(19) United States
(12) Patent Application Publication
(10) Pub. No.: US 2022/0206001 A1
(43) Pub. Date: Jun. 30, 2022

(54) METHODS AND SYSTEMS FOR DETECTING CORONAVIRUS

(71) Applicant: Twist Bioscience Corporation, South San Francisco, CA (US)

(72) Inventor: Aaron SATO, Burlingame, CA (US)

(21) Appl. No.: 17/507,703

(22) Filed: Oct. 21, 2021

Related U.S. Application Data
(60) Provisional application No. 63/104,368, filed on Oct. 22, 2020.

(51) Int. Cl. G01N 33/569; C07K 16/10

(52) U.S. Cl. CPC G01N 33/56983; C07K 16/10; A61K 2039/505; C07K 2317/92; C07K 2317/565; C07K 2317/76

(57) ABSTRACT

Provided herein are methods and systems for detecting coronavirus. Methods and systems as described herein comprise using antibodies with improved specificity and sensitivity for accurately detecting coronavirus.

### CROSS-REFERENCE

[0001] This application claims the benefit of U.S. Provisional Patent Application No. 63/104,368 filed on Oct. 22, 2020, which is incorporated by reference in its entirety.

### SEQUENCE LISTING

[0002] The instant application contains a Sequence Listing which has been submitted electronically in ASCII format and is hereby incorporated by reference in its entirety. Said ASCII copy, created on Nov. 30, 2021, is named 44854-810_201_SL.txt and is 2,287,083 bytes in size.

### BACKGROUND

[0003] Coronaviruses like severe acute respiratory coronavirus 2 (SARS-CoV-2) can cause severe respiratory problems. Accurate and timely detection of infection is important for diagnosis and identifying effective treatments. Antibodies possess the capability to bind with high specificity and affinity to biological targets and be incorporated in systems and devices for detecting coronavirus.

### INCORPORATION BY REFERENCE

[0004] All publications, patents, and patent applications mentioned in this specification are herein incorporated by reference to the same extent as if each individual publication, patent, or patent application was specifically and individually indicated to be incorporated by reference.

### BRIEF SUMMARY

[0005] Provided herein are devices for detecting a virus in a sample comprising: a) a sample application pad for receiving the sample; and b) a membrane substrate comprising a first test line, the first test line comprising an immobilized antibody or antibody fragment, wherein the immobilized antibody or antibody fragment comprises a predetermined number of variants within a complementarity determining region (CDR) relative to a reference antibody or antibody fragment, and wherein the immobilized antibody or antibody fragment comprises at least a 2.5× higher binding affinity than a binding affinity of the reference antibody or antibody fragment. Further provided herein are devices, wherein the device is a lateral flow immunoassay. Further provided herein are devices, wherein the immobilized antibody comprises a light chain variable domain comprising at least about 80% sequence identity to any one of SEQ ID NOs: 1, 3, 5, 7, 9, 11, or 13. Further provided herein are devices, wherein the immobilized antibody comprises a heavy chain variable domain comprising at least about 80% sequence identity to any one of SEQ ID NOs: 2, 4, 6, 8, 10, 12, 14, or 15. Further provided herein are devices, wherein the immobilized antibody comprises a heavy chain variable domain CDR comprising at least about 80% sequence identity to any one of SEQ ID NOs: 16-39. Further provided herein are devices, wherein the immobilized antibody comprises a light chain variable domain CDR comprising at least about 80% sequence identity to any one of SEQ ID NOs: 40-60. Further provided herein are devices, wherein the CDR comprises at least one variant relative to the reference antibody or antibody fragment. Further provided herein are devices, wherein the CDR comprises at least two variants relative to the reference antibody or antibody fragment. Further provided herein are devices, wherein the immobilized antibody or antibody fragment comprises at least 5× higher binding affinity than a binding affinity of the reference antibody or antibody fragment. Further provided herein are devices, wherein the immobilized antibody or antibody fragment comprises at least 25× higher binding affinity than a binding affinity of the reference antibody or antibody fragment. Further provided herein are devices, wherein the CDR is a CDR1, CDR2, and CDR3 on a heavy chain. Further provided herein are devices, wherein the CDR is a CDR1, CDR2, and CDR3 on a light chain. Further provided herein are devices, wherein the immobilized antibody comprises an EC50 of less than about 5 nM. Further provided herein are devices, wherein the immobilized antibody comprises an EC50 of less than about 1 nM. Further provided herein are devices, wherein the immobilized antibody comprises a binding affinity of less than about 100 nM. Further provided herein are devices, wherein the immobilized antibody comprises a binding affinity of less than about 25 nM. Further provided herein are devices, wherein the immobilized antibody comprises a binding affinity of less than about 1 nM. Further provided herein are devices, wherein the virus is a respiratory virus. Further provided herein are devices, wherein the respiratory virus is a coronavirus. Further provided herein are devices, wherein the coronavirus is SARS, MERS, COVID-19, bovine, norovirus, orthoreoviruses (reoviruses), human rotaviruses, human coronaviruses, herpesvirus, or adenoviruses. Further provided herein are devices, wherein the immobilized antibody detects SARS-CoV-2. Further provided herein are devices, wherein the sample comprises saliva, blood, semen, vaginal fluid, or urine. Further provided herein are devices, wherein the sample comprises saliva. Further provided herein are devices, wherein the membrane substrate further comprises at least one control line. Further provided herein are devices, wherein the device further comprises a backing. Further provided herein are devices, wherein the device further comprises a wicking pad. Further provided herein are devices, wherein the device comprises a sensitivity of at least about 70% for detecting the virus. Further provided herein are devices, wherein the device detects viral titers in a range of about 10³ to about 10⁴ viral particles. Further provided herein are devices, wherein the device comprises a specificity of at least about 70% for detecting the virus as compared to another virus. Further provided herein are devices, wherein the device is specific for detecting SARS-CoV-2. Further provided herein are devices, wherein the device comprises a limit of detection of at least about 10³ copies/mL.

[0006] Provided herein are methods of detecting a virus, the method comprising: a) contacting a sample comprising the virus with a device described herein; and b) detecting the virus if the first test line undergoes a color change. Further provided herein are methods, wherein the method detects the virus in at most about 20 minutes. Further provided herein are methods, wherein the method detects the virus in at most about 15 minutes.

[0007] Provided herein are kits comprising: a) a device described herein, and b) instructions for use thereof.

### BRIEF DESCRIPTION OF THE DRAWINGS

[0008] FIG. 1 depicts an exemplary lateral flow assay device.

[0009] FIG. 2 presents a diagram of steps demonstrating an exemplary process workflow for gene synthesis as disclosed herein.

[0010] FIG. 3 illustrates an example of a computer system.

[0011] FIG. 4 is a block diagram illustrating an architecture of a computer system.

[0012] FIG. 5 is a diagram demonstrating a network configured to incorporate a plurality of computer systems, a plurality of cell phones and personal data assistants, and Network Attached Storage (NAS).

[0013] FIG. 6 is a block diagram of a multiprocessor computer system using a shared virtual address memory space.

[0014] FIGS. 7A-7K are graphs showing antibody binding using surface plasmon resonance (SPR, Carterra LSA) to either recombinant SARS-CoV-2 S1 monomer, stabilized SARS-CoV-2 S Trimer, or SARS-CoV S1 monomer.

[0015] FIGS. 7L-7M show gel and electropherograms of Ab-1 analysis (FIG. 7L) and Ab-8 (FIG. 7M).

[0016] FIG. 8 are graphs of Ab-1 capturing either S trimer from Acro Biosystems (left panel) or S Spike Protein (right panel) using Ab-7, Ab-4, or CR3022 detection.

[0017] FIG. 9 shows images of a lateral flow antibody test.

[0018] FIG. 10A shows graphs of data from the lateral flow antibody test using a dry capture.

[0019] FIG. 10B is an image of test strips from the lateral flow antibody test.

[0020] FIG. 10C is an image of test strips from the lateral flow antibody test showing the spike trimer passing through the device.

[0021] FIG. 11A shows an image of test trips testing inactivated virus.

[0022] FIG. 11B shows data from live virus on swabs.

[0023] FIG. 12 is a schema for a rapid antigen detection (RAD) assay for detecting SARS-CoV-2.

[0024] FIGS. 13A-13B are images of test strips using the lateral flow device as compared to data from PCR.

[0025] FIGS. 13C-13E are images of test strips for detecting SARS-CoV-2 in SARS-CoV-2 positive saliva samples.

[0026] FIGS. 14A-14E are images of the lateral flow assays and detection cassettes.

[0027] FIGS. 15A-15B are a schema for detection of SARS-CoV-2 using the integrated cassette.

[0028] FIGS. 16A-16B are a schema for detection of SARS-CoV-2 using the open well cassette.

[0029] FIG. 17 depicts lateral flow assays used to detect SARS-CoV-2 at different concentrations.

[0030] FIGS. 18A-18D are lateral flow assay cassettes used to detect different concentrations of SARS-CoV-2.

[0031] FIG. 19 is a representative lateral flow assay cassette used in the clinical trial.

[0032] FIGS. 20A-20C depict the effects of single and double purification of saliva samples on nonspecific binding.

[0033] FIG. 21 depicts a lateral flow strip tested at a pH of 4 and a pH of 10.

[0034] FIG. 22 depicts a lateral flow assay using Ab-10 as a detector antibody Ab-10 and Ab-9 as a capture antibody.

[0035] FIG. 23A compares pairs of 7 conjugate detector antibodies with 5 capture antibodies targeting nucleocapsid.

[0036] FIG. 23B depicts a comparison of two candidate detector antibodies against 5 capture antibodies targeting nucleocapsid.

[0037] FIG. 23C-23D depicts the effects of an optimized buffer on nucleocapsid and spike binding and detection.

[0038] FIGS. 24A-24B depicts the results of different rations of capture and detector antibodies on nonspecific binding.

[0039] FIG. 25 depicts positive results of a clinical trial to detect SARS-CoV-2.

[0040] FIG. 26 depicts the results of buffer optimization on nonspecific binding.

[0041] FIG. 27 depicts the results of purification of saliva samples on nonspecific binding.

[0042] FIG. 28 depicts the ability of the nucleocapsid and spike assay to detect virus in diluted inactivated virus and nasopharyngeal samples.

[0043] FIG. 29 compares the ability to detect dilutions of inactivated virus in saliva of the nucleocapsid+spike lateral flow assay to the spike lateral flow assay.

[0044] FIG. 30 compares the ability to detect dilutions of virus in nasopharyngeal samples of the nucleocapsid+spike lateral flow assay to the spike lateral flow assay.

[0045] FIG. 31 depicts the effect of adding mucolytic agents to saliva samples on nonspecific binding.

### DETAILED DESCRIPTION

[0046] The present disclosure employs, unless otherwise indicated, conventional molecular biology techniques, which are within the skill of the art. Unless defined otherwise, all technical and scientific terms used herein have the same meaning as is commonly understood by one of ordinary skill in the art.

### Definitions

[0047] Throughout this disclosure, various embodiments are presented in a range format. It should be understood that the description in range format is merely for convenience and brevity and should not be construed as an inflexible limitation on the scope of any embodiments. Accordingly, the description of a range should be considered to have specifically disclosed all the possible subranges as well as individual numerical values within that range to the tenth of the unit of the lower limit unless the context clearly dictates otherwise. For example, description of a range such as from 1 to 6 should be considered to have specifically disclosed subranges such as from 1 to 3, from 1 to 4, from 1 to 5, from 2 to 4, from 2 to 6, from 3 to 6 etc., as well as individual values within that range, for example, 1.1, 2, 2.3, 5, and 5.9. This applies regardless of the breadth of the range. The upper and lower limits of these intervening ranges may independently be included in the smaller ranges, and are also encompassed within the disclosure, subject to any specifically excluded limit in the stated range. Where the stated range includes one or both of the limits, ranges excluding either or both of those included limits are also included in the disclosure, unless the context clearly dictates otherwise.

[0048] The terminology used herein is for the purpose of describing particular embodiments only and is not intended to be limiting of any embodiment. As used herein, the singular forms “a,” “an” and “the” are intended to include the plural forms as well, unless the context clearly indicates otherwise. It will be further understood that the terms “comprises” and/or “comprising,” when used in this specification, specify the presence of stated features, integers, steps, operations, elements, and/or components, but do not preclude the presence or addition of one or more other features, integers, steps, operations, elements, components, and/or groups thereof. As used herein, the term “and/or” includes any and all combinations of one or more of the associated listed items.

[0049] Unless specifically stated or obvious from context, as used herein, the term “about” in reference to a number or range of numbers is understood to mean the stated number and numbers +/−10% thereof, or 10% below the lower listed limit and 10% above the higher listed limit for the values listed for a range.

[0050] As used herein the terms “individual,” “patient,” or “subject” are used interchangeably and refer to individuals diagnosed with, suspected of being afflicted with, or at-risk of developing at least one disease for which the described systems and devices are useful for detecting. In embodiments the individual is a mammal. In embodiments, the mammal is a mouse, rat, rabbit, dog, cat, horse, cow, sheep, pig, goat, llama, alpaca, or yak. In embodiments, the individual is a human.

[0051] As used herein, the terms “polypeptide”, “protein” and “peptide” are used interchangeably and refer to a polymer of amino acid residues linked via peptide bonds and which may be composed of two or more polypeptide chains. The terms “polypeptide”, “protein” and “peptide” refer to a polymer of at least two amino acid monomers joined together through amide bonds. An amino acid may be the L-optical isomer or the D-optical isomer. More specifically, the terms “polypeptide”, “protein” and “peptide” refer to a molecule composed of two or more amino acids in a specific order; for example, the order as determined by the base sequence of nucleotides in the gene or RNA coding for the protein. In some cases, a protein is a portion of the protein, for example, a domain, a subdomain, or a motif of the protein. In some cases, a protein is a variant (or mutation) of the protein, wherein one or more amino acid residues are inserted into, deleted from, and/or substituted into the naturally occurring (or at least a known) amino acid sequence of the protein. A protein or a variant thereof can be naturally occurring or recombinant.

[0052] Unless specifically stated, as used herein, the term “nucleic acid” encompasses double- or triple-stranded nucleic acids, as well as single-stranded molecules. In double- or triple-stranded nucleic acids, the nucleic acid strands need not be coextensive (i.e., a double-stranded nucleic acid need not be double-stranded along the entire length of both strands). Nucleic acid sequences, when provided, are listed in the 5′ to 3′ direction, unless stated otherwise. Methods described herein provide for the generation of isolated nucleic acids. Methods described herein additionally provide for the generation of isolated and purified nucleic acids. A “nucleic acid” as referred to herein can comprise at least 5, 10, 20, 30, 40, 50, 60, 70, 80, 90, 100, 125, 150, 175, 200, 225, 250, 275, 300, 325, 350, 375, 400, 425, 450, 475, 500, 600, 700, 800, 900, 1000, 1100, 1200, 1300, 1400, 1500, 1600, 1700, 1800, 1900, 2000, or more bases in length. Moreover, provided herein are methods for the synthesis of any number of polypeptide-segments encoding nucleotide sequences, including sequences encoding non-ribosomal peptides (NRPs), sequences encoding non-ribosomal peptide-synthetase (NRPS) modules and synthetic variants, polypeptide segments of other modular proteins, such as antibodies, polypeptide segments from other protein families, including non-coding DNA or RNA, such as regulatory sequences e.g. promoters, transcription factors, enhancers, siRNA, shRNA, RNAi, miRNA, small nucleolar RNA derived from microRNA, or any functional or structural DNA or RNA unit of interest. The following are non-limiting examples of polynucleotides: coding or non-coding regions of a gene or gene fragment, intergenic DNA, loci (locus) defined from linkage analysis, exons, introns, messenger RNA (mRNA), transfer RNA, ribosomal RNA, short interfering RNA (siRNA), short-hairpin RNA (shRNA), micro-RNA (miRNA), small nucleolar RNA, ribozymes, complementary DNA (cDNA), which is a DNA representation of mRNA, usually obtained by reverse transcription of messenger RNA (mRNA) or by amplification; DNA molecules produced synthetically or by amplification, genomic DNA, recombinant polynucleotides, branched polynucleotides, plasmids, vectors, isolated DNA of any sequence, isolated RNA of any sequence, nucleic acid probes, and primers. cDNA encoding for a gene or gene fragment referred herein may comprise at least one region encoding for exon sequences without an intervening intron sequence in the genomic equivalent sequence. cDNA described herein may be generated by de novo synthesis.

[0053] Systems and Devices for Detecting Coronavirus

[0054] Provided herein are methods, devices, and systems comprising antibodies that comprise high affinity and high specificity. In some embodiments, the antibodies detect SARS-CoV, MERS-CoV, CoV-229E, HCoV-NL63, HCoV-OC43, or HCoV-HKU1. In some embodiments, the antibodies detect SARS-CoV-2. In some embodiments, the antibodies detect a receptor that binds to the coronavirus. In some embodiments, the receptor of the coronavirus is ACE2 or dipeptidyl peptidase 4 (DPP4). In some embodiments, the antibodies detect angiotensin-converting enzyme 2 (ACE2). The antibodies as described herein may be optimized using methods as described herein to have improved specificity, sensitivity, accuracy, and reliability.

[0055] The antibodies as described herein may be used for a device for detecting SARS-CoV-2. FIG. 1 shows an example of a virus being captured and detected using a device with respect to some embodiments disclosed herein. The device 100 is a lateral flow device. In some instances the device comprises a backing 101. In some instances, the backing is a solid backing. The solid backing may comprise any suitable material including, but not limited to, plastic, fiber, and glass. In some instances, the backing comprises an adhesive. A sample 103 is applied to the sample application pad 105. In some instances, the sample is a biological sample. In some instances, the biological sample is a fluid (e.g., bodily fluid) sample. In some instances, the fluid is saliva, blood, semen, vaginal fluid, or urine. In some instances, the fluid is saliva. The sample then travels to the membrane substrate 107 and the capture and detection process occurs on a test line 109. The test line may comprise an immobilized antibody. In some instances, the immobilized antibody is an antibody to detect SARS-CoV, MERS-CoV, CoV-229E, HCoV-NL63, HCoV-OC43, or HCoV-HKU1. In some embodiments, the antibody detects SARS-CoV-2. In some embodiments, the antibody detects a receptor that binds to the coronavirus. In some embodiments, the receptor of the coronavirus is ACE2 or dipeptidyl peptidase 4 (DPP4). In some instances, the antibodies are conjugated with latex via Amide Beads. The membrane substrate also includes a control line 111. The device may further comprise a wicking pad 113. Wicking pads may prevent backflow. In some instances, the wicking pad comprises a cellulose filter. Results from the test line and the control line may be visible, for example, as a color or a color change. In some instances, the results from the test line and the control line are compared. Results from the device may then be transferred. In some instances, the results are transferred, wirelessly or through a cable, to a computerized device to process and display the information. In some embodiments, the result is transmitted to a software program on a computerized device, where the computerized device has a graphical user interface that displays the assay results. In some instances, the results are transferred to a database. In some instances, the results from the database are used for bioinformatics applications such as functional genomics and homology searching.

[0056] Described herein are methods and devices for detecting SARS-CoV-2, wherein the device can comprise a sample application pad for receiving the sample. In some instances, the sample application pad further comprises a buffer, or pH calibrator, a peptide, or an antibody. In some instances, the buffer is a running/chase buffer. The running buffer is a component of lateral flow assay and may depend upon the choice of the conjugate conditions, membrane selection criteria, sample matrix, and sample pad material. The running buffer may facilitate the flow of the fluid in the detection and diagnostic device. In some cases, the sample application pad comprises a phosphate-buffered saline, blocking buffer (e.g., casein or Tween reagent), a surfactant, additives, and other reagents to increase sensitivity of the assay. In some instances, the running buffer comprises phosphate buffer comprising casein, BSA, and Tween 20. In some instances, the running buffer comprises 1×PBS, 0.25% Casein, 0.5% BSA, and 2% Tween20. In some instances, the buffer is a citrate buffer.

[0057] Various types of samples can be used with the methods and devices described herein. In some instances, the sample is a biological sample. In some instances, the biological sample is a fluid (e.g., bodily fluid). In some instances, the fluid is saliva, blood, semen, vaginal fluid, or urine. In some instances, the fluid is saliva. In some instances, the sample is collected from a human subject or an animal subject. In some cases, the sample is collected by means including but not limited to spitting, wiping saliva, nasal swab, mouth swab, or urinating. The sample may then be transferred to the sample pad. In some cases, the sample is directly collected on the sample application pad such as by spitting on the sample application pad.

[0058] A small volume of sample is required to practice the systems and devices as described herein. In some embodiments, a suitable amount of sample applied to the sample pad is about 5 uL to about 50 uL. In some embodiments, a suitable amount of sample applied to the sample pad is at least about 5 uL. In some embodiments, a suitable amount of sample applied to the sample pad is at most about 500 uL. In some embodiments, a suitable amount of sample applied to the sample pad is about 500 uL, 1000 uL, 1500 uL, 2000 uL, 2500 uL, 3000 uL, 3500 uL, 4000 uL, 4500 uL, or 5000 uL. In some embodiments, a suitable amount of sample applied to the sample pad is about 500 uL to about 1000 uL, about 500 uL to about 1500 uL, about 500 uL to about 2000 uL, about 500 uL to about 2500 uL, about 500 uL to about 3000 uL, about 500 uL to about 2500 uL, about 500 uL to about 4000 uL, about 500 uL to about 4500 uL, about 500 uL to about 5000 uL, about 1000 uL to about 1500 uL, about 1000 uL to about 2000 uL, about 1000 uL to about 2500 uL, about 1000 uL to about 3000 uL, about 1000 uL to about 2500 uL, about 1000 uL to about 4000 uL, about 1000 uL to about 4500 uL, about 1000 uL to about 5000 uL, about 1500 uL to about 2000 uL, about 1500 uL to about 2500 uL, about 1500 uL to about 3000 uL, about 1500 uL to about 2500 uL, about 1500 uL to about 4000 uL, about 1500 uL to about 4500 uL, about 1500 uL to about 5000 uL, about 2000 uL to about 2500 uL, about 2000 uL to about 3000 uL, about 2000 uL to about 2500 uL, about 2000 uL to about 4000 uL, about 2000 uL to about 4500 uL, about 2000 uL to about 5000 uL, about 2500 uL to about 3000 uL, about 2500 uL to about 2500 uL, about 2500 uL to about 4000 uL, about 2500 uL to about 4500 uL, about 2500 uL to about 5000 uL, about 3000 uL to about 2500 uL, about 3000 uL to about 4000 uL, about 3000 uL to about 4500 uL, about 3000 uL to about 5000 uL, about 2500 uL to about 4000 uL, about 2500 uL to about 4500 uL, about 2500 uL to about 5000 uL, about 4000 uL to about 4500 uL, about 4000 uL to about 5000 uL, or about 4500 uL to about 5000 uL.

[0059] Following application of the sample to the sample application pad, the virus is detected on a membrane. In some instances, the membrane comprises woven mesh, cellulose filters, glass fiber, mixed glass fiber and cellulose, synthetic fiber, mixed fiber, surface modified plastic (polyester, polypropylene, or polyethylene), graded density polyethersulfone (PES), or combinations thereof. In some aspects, the membrane comprises nitrocellulose.

[0060] The membrane substrate can comprise any suitable form. In some instances, the membrane is in a form of a strip. In some instances, the membrane is in a form of a circle.

[0061] The membrane substrate may be modified into a predefined dimension to control the speed and accuracy of the test. In some instances, the membrane substrate is about 4 millimeters (mm) to about 100 mm. In some instances, the membrane substrate is at least about 4 mm, 5 mm, 6 mm, 7 mm, 8 mm, 9 mm, 10 mm, 11 mm, 12 mm, 16 mm, 18 mm, 20 mm, 24 mm, 26 mm, 28 mm, 30 mm, 40 mm, 50 mm, 60 mm, or more than 60 mm by about 4 mm, 5 mm, 6 mm, 7 mm, 8 mm, 9 mm, 10 mm, 11 mm, 12 mm, 16 mm, 18 mm, 20 mm, 24 mm, 26 mm, 28 mm, 30 mm, 40 mm, 50 mm, 60 mm, or more than 60 mm. In some instances, the membrane substrate is at least about 4 mm, 5 mm, 6 mm, 7 mm, 8 mm, 9 mm, 10 mm, 11 mm, 12 mm, 16 mm, 18 mm, 20 mm, 24 mm, 26 mm, 28 mm, 30 mm, 40 mm, 50 mm, 60 mm, or more than 60 mm in width. the membrane substrate is at least about 4 mm, 5 mm, 6 mm, 7 mm, 8 mm, 9 mm, 10 mm, 11 mm, 12 mm, 16 mm, 18 mm, 20 mm, 24 mm, 26 mm, 28 mm, 30 mm, 40 mm, 50 mm, 60 mm, or more than 60 mm in length. In some instances, the membrane substrate is at least about 4 mm, 5 mm, 6 mm, 7 mm, 8 mm, 9 mm, 10 mm, 11 mm, 12 mm, 16 mm, 18 mm, 20 mm, 24 mm, 26 mm, 28 mm, 30 mm, 40 mm, 50 mm, 60 mm, or more than 60 mm in thickness. In some aspects, the membrane substrate is about 8 mm in thickness.

[0062] In some instances, at least a portion of the membrane is supported by a solid backing. The solid backing may comprise any suitable material including, but not limited to, plastic, fiber, and glass. In some instances, the backing comprises an adhesive.

[0063] In some instances, the membrane comprises a first test location on the membrane. In some instances, the first test location is a surface that is amenable to antibody immobilization. In some instances, the first test location comprises a reagent that binds to an analyte in the sample. The analyte may be a virus. In some instances, the analyte is SARS-CoV-2. The reagent that binds to the analyte, in some instances, is an antibody.

[0064] As used herein, the term antibody will be understood to include proteins having the characteristic two-armed, Y-shape of a typical antibody molecule as well as one or more fragments of an antibody that retain the ability to specifically bind to an antigen. Exemplary antibodies include, but are not limited to, a monoclonal antibody, a polyclonal antibody, a bi-specific antibody, a multispecific antibody, a grafted antibody, a human antibody, a humanized antibody, a synthetic antibody, a chimeric antibody, a camelized antibody, a single-chain Fvs (scFv) (including fragments in which the VL and VH are joined using recombinant methods by a synthetic or natural linker that enables them to be made as a single protein chain in which the VL and VH regions pair to form monovalent molecules, including single chain Fab and scFab), a single chain antibody, a Fab fragment (including monovalent fragments comprising the VL, VH, CL, and CH1 domains), a F(ab′)2 fragment (including bivalent fragments comprising two Fab fragments linked by a disulfide bridge at the hinge region), a Fd fragment (including fragments comprising the VH and CH1 fragment), a Fv fragment (including fragments comprising the VL and VH domains of a single arm of an antibody), a single-domain antibody (dAb or sdAb) (including fragments comprising a VH domain), an isolated complementarity determining region (CDR), a diabody (including fragments comprising bivalent dimers such as two VL and VH domains bound to each other and recognizing two different antigens), a fragment comprised of only a single monomeric variable domain, disulfide-linked Fvs (sdFv), an intrabody, an anti-idiotypic (anti-Id) antibody, or ab antigen-binding fragments thereof. In some instances, the libraries disclosed herein comprise nucleic acids encoding for an antibody, wherein the antibody is a Fv antibody, including Fv antibodies comprised of the minimum antibody fragment which contains a complete antigen-recognition and antigen-binding site. In some embodiments, the Fv antibody consists of a dimer of one heavy chain and one light chain variable domain in tight, non-covalent association, and the three hypervariable regions of each variable domain interact to define an antigen-binding site on the surface of the VH-VL dimer. In some embodiments, the six hypervariable regions confer antigen-binding specificity to the antibody. In some embodiments, a single variable domain (or half of an Fv comprising only three hypervariable regions specific for an antigen, including single domain antibodies isolated from camelid animals comprising one heavy chain variable domain such as VHH antibodies or nanobodies) has the ability to recognize and bind antigen. In some instances, the libraries disclosed herein comprise nucleic acids encoding for an antibody, wherein the antibody is a single-chain Fv or scFv, including antibody fragments comprising a VH, a VL, or both a VH and VL domain, wherein both domains are present in a single polypeptide chain. In some embodiments, the Fv polypeptide further comprises a polypeptide linker between the VH and VL domains allowing the scFv to form the desired structure for antigen binding. In some instances, a scFv is linked to the Fc fragment or a VHH is linked to the Fc fragment (including minibodies). In some instances, the antibody comprises immunoglobulin molecules and immunologically active fragments of immunoglobulin molecules, e.g., molecules that contain an antigen binding site. Immunoglobulin molecules are of any type (e.g., IgG, IgE, IgM, IgD, IgA and IgY), class (e.g., IgG 1, IgG 2, IgG 3, IgG 4, IgA 1 and IgA 2) or subclass.

[0065] Methods and systems as described herein may comprise various test lines. In some instances, the first test line comprises at least one immobilized antibody coupled to the membrane. In some instances, the first test line comprises at least two immobilized antibodies coupled to the membrane. In some instances, an immobilized antibody targets or detects a coronavirus. In some instances, the immobilized antibody targets or detects a structural protein of a virus, or a fragment of a viral protein. In some instances, the immobilized antibody targets or detects a spike protein, a membrane protein, an envelope protein, a nucleocapsid protein, or combinations thereof. In some instances, the immobilized antibody targets or detects an angiotensin converting enzyme 2. In some instances, the at least two immobilized antibodies detect a spike protein and a nucleocapsid protein.

[0066] In some instances, the second test line is a control line. In some embodiments, the control line comprises an antibody or antibody fragment. In some instances, the antibody is a mouse, rat, rabbit, cat, dog, goat, chicken, bovine, horse, llama, camel, dromedary, shark, non-human primate, human, or humanized antibody. In some instances, the first test line is placed upstream of the control line. In some instances, the first line is placed downstream of the control line. In some instances, the control line is compared to the first test line.

[0067] Antibodies described herein for use with the test device for detecting SARS-CoV-2 may be optimized by the design of in-silico libraries comprising variant sequences of an input antibody sequence. Input sequences are in some instances modified in-silico with one or more mutations to generate libraries of optimized sequences. In some instances, such libraries are synthesized, cloned into expression vectors, and translation products (antibodies) evaluated for activity. In some instances, fragments of sequences are synthesized and subsequently assembled. In some instances, expression vectors are used to display and enrich desired antibodies, such as phage display. Selection pressures used during enrichment in some instances includes, but is not limited to, binding affinity, toxicity, immunological tolerance, stability, receptor-ligand competition, or developability. Such expression vectors allow antibodies with specific properties to be selected (“panning”), and subsequent propagation or amplification of such sequences enriches the library with these sequences. Panning rounds can be repeated any number of times, such as 1, 2, 3, 4, 5, 6, 7, or more than 7 rounds. Sequencing at one or more rounds is in some instances used to identify which sequences have been enriched in the library.

[0068] Described herein are methods and systems of in-silico library design. For example, an antibody or antibody fragment sequence is used as input. In some instances, the antibody sequence used as input is an antibody or antibody fragment sequence that binds SARS-CoV-2. In some instances, the input is an antibody or antibody fragment sequence that binds a protein of SARS-CoV-2. In some instances, the protein is a spike glycoprotein, a membrane protein, an envelope protein, a nucleocapsid protein, or combinations thereof. In some instances, the protein is a spike glycoprotein of SARS-CoV-2. In some instances, the protein is a receptor binding domain of SARS-CoV-2. In some instances, the input sequence is an antibody or antibody fragment sequence that binds angiotensin-converting enzyme 2 (ACE2). In some instances, the input sequence is an antibody or antibody fragment sequence that binds an extracellular domain of the angiotensin-converting enzyme 2 (ACE2).

[0069] In some instances, the antibodies described herein are optimized by assaying for functional activity, structural stability (e.g., thermal stable or pH stable), expression, specificity, or a combination thereof. In some instances, the antibodies are assayed for antibody capable of folding. In some instances, a region of the antibody is assayed for functional activity, structural stability, expression, specificity, folding, or a combination thereof.

[0070] Antibodies to be used with the methods and systems as described herein may comprise a sequence set forth in Table 1 or Tables 9-14. In some embodiments, the sequence comprises at least or about 70%, 80%, 85%, 90%, 91%, 92%, 93%, 94%, 95%, 96%, 97%, 98%, 99%, or 100% sequence identity to any one of SEQ ID NOs: 1, 2, 3, 4, 5, 6, 7, 8, 9, 10, 11, 12, 13, 14, 15, 61, 62, 63, 64, 65, 66, 67, 68, 69, 70, 71, 72, 73, 74, 75, 76, 77, 78, 79, 80, 81, 82, 83, 84, 85, 86, 87, 88, 89, 80, 81, 92, 93, 94, 95, 96, 97, 98, 99, 100, 101, 102, 103, 104, 105, 106, 107, 108, 109, 110, 111, 112, 113, 114, 115, 116, 117, 118, 119, 120, 121, 122, 123, 124, 125, 126, 127, 128, 129, 130, 131, 132, 133, 134, 135, 136, 137, 138, 139, 140, or 141. In some instances, the sequence comprises at least or about 95% homology to any one of SEQ ID NOs: 1, 2, 3, 4, 5, 6, 7, 8, 9, 10, 11, 12, 13, 14, 15, 61, 62, 63, 64, 65, 66, 67, 68, 69, 70, 71, 72, 73, 74, 75, 76, 77, 78, 79, 80, 81, 82, 83, 84, 85, 86, 87, 88, 89, 80, 81, 92, 93, 94, 95, 96, 97, 98, 99, 100, 101, 102, 103, 104, 105, 106, 107, 108, 109, 110, 111, 112, 113, 114, 115, 116, 117, 118, 119, 120, 121, 122, 123, 124, 125, 126, 127, 128, 129, 130, 131, 132, 133, 134, 135, 136, 137, 138, 139, 140, or 141. In some instances, the sequence comprises at least or about 97% homology to any one of SEQ ID NOs: 1, 2, 3, 4, 5, 6, 7, 8, 9, 10, 11, 12, 13, 14, 15, 61, 62, 63, 64, 65, 66, 67, 68, 69, 70, 71, 72, 73, 74, 75, 76, 77, 78, 79, 80, 81, 82, 83, 84, 85, 86, 87, 88, 89, 80, 81, 92, 93, 94, 95, 96, 97, 98, 99, 100, 101, 102, 103, 104, 105, 106, 107, 108, 109, 110, 111, 112, 113, 114, 115, 116, 117, 118, 119, 120, 121, 122, 123, 124, 125, 126, 127, 128, 129, 130, 131, 132, 133, 134, 135, 136, 137, 138, 139, 140, or 141. In some instances, the sequence comprises at least or about 99% homology to any one of SEQ ID NOs: 1, 2, 3, 4, 5, 6, 7, 8, 9, 10, 11, 12, 13, 14, 15, 61, 62, 63, 64, 65, 66, 67, 68, 69, 70, 71, 72, 73, 74, 75, 76, 77, 78, 79, 80, 81, 82, 83, 84, 85, 86, 87, 88, 89, 80, 81, 92, 93, 94, 95, 96, 97, 98, 99, 100, 101, 102, 103, 104, 105, 106, 107, 108, 109, 110, 111, 112, 113, 114, 115, 116, 117, 118, 119, 120, 121, 122, 123, 124, 125, 126, 127, 128, 129, 130, 131, 132, 133, 134, 135, 136, 137, 138, 139, 140, or 141. In some instances, the sequence comprises at least or about 100% homology to any one of SEQ ID NOs: 1, 2, 3, 4, 5, 6, 7, 8, 9, 10, 11, 12, 13, 14, 15, 61, 62, 63, 64, 65, 66, 67, 68, 69, 70, 71, 72, 73, 74, 75, 76, 77, 78, 79, 80, 81, 82, 83, 84, 85, 86, 87, 88, 89, 80, 81, 92, 93, 94, 95, 96, 97, 98, 99, 100, 101, 102, 103, 104, 105, 106, 107, 108, 109, 110, 111, 112, 113, 114, 115, 116, 117, 118, 119, 120, 121, 122, 123, 124, 125, 126, 127, 128, 129, 130, 131, 132, 133, 134, 135, 136, 137, 138, 139, 140, or 141. In some instances, the sequence comprises at least a portion having at least or about 10, 20, 30, 40, 50, 60, 70, 80, 90, 100, 110, or more than 110 amino acids of any one of SEQ ID NOs: 1, 2, 3, 4, 5, 6, 7, 8, 9, 10, 11, 12, 13, 14, 15, 61, 62, 63, 64, 65, 66, 67, 68, 69, 70, 71, 72, 73, 74, 75, 76, 77, 78, 79, 80, 81, 82, 83, 84, 85, 86, 87, 88, 89, 80, 81, 92, 93, 94, 95, 96, 97, 98, 99, 100, 101, 102, 103, 104, 105, 106, 107, 108, 109, 110, 111, 112, 113, 114, 115, 116, 117, 118, 119, 120, 121, 122, 123, 124, 125, 126, 127, 128, 129, 130, 131, 132, 133, 134, 135, 136, 137, 138, 139, 140, or 141.

TABLE 1
SARS-CoV-2 Variant Light Chain (LC) Variable Domain and Heavy
Chain (HC) Variable Domain Sequences

| Construct | | SEQ ID |
|---|---|---|
| Description | Amino Acid Sequence | NO: |
| Ab-1 LC | DIQMTQSPSSLSASVGDRVTITCRASQSIDTYLNWYQQKPGKA | 1 |
| | PKLLIYAASALASGVPSRFSGSGSGTDFTLTISSLQPEDFATYYC | |
| | QQSYSAPPYTFGQGTKVEIK | |
| Ab-1 HC | EVQLLESGGGLVQPGGSLRLSCAASGFTFSNYPMNWVRQAPG | 2 |
| | KGLEWVSTISGSGGNTFYADSVKGRFTISRDNSKNTLYLQMNS | |
| | LRAEDTAVYYCVRHDEYSFDYWGQGTLVTVSS | |
| Ab-2 LC | QSALTQPASVSGSPGQSITISCTGTSSDVGHYNLVSWYQQHPG | 3 |
| | KAPKLMIYEGTKRPSGVSNRFSGSKSGNTASLTISGLQAEDEA | |
| | DYYCCSYAGSSSFVVFGGGTKLTVL | |
| Ab-2 HC | EVQLLESGGGLVQPGGSLRLSCAASGITFSSYAMSWVRQAPG | 4 |
| | KGLEWVSGISGSGGSTYYADSVKGRFTISRDNSKNTLYLQMNS | |
| | LRAEDTAVYYCAKHGSGTIFGVVIAKYYFDYWGQGTLVTVSS | |
| Ab-3 LC | DIQMTQSPSSLSASVGDRVTITCRASQTINTFLNWYQQKPGKA | 5 |
| | PKLLIYSASTLQSGVPSRFSGSGSGTDFTLTISSLQPEDFATYYC | |
| | QQSYSTFTFGGGTKVEIK | |
| Ab-3 HC | EVQLLESGGGLVQPGGSLRLSCAASGFTFSRHAMNVVVRQAPG | 6 |
| | KGLEWVSGITGSGDETYYADSVKGRFTISRDNSKNTLYLQMN | |
| | SLKAEDTAVYYCARDLPASYYDSSGYYWHNGMDVWGQGTL | |
| | VTVSS | |
| Ab-4 LC | DIQMTQSPSSLSASVGDRVTITCRASQTINTYLNWYQQKPGKA | 7 |
| | PKLLIYSASTLQSGVPSRFSGSGSGTDFTLTISSLQPEDFATYYC | |
| | QQSYSTFTFGQGTKVEIK | |
| Ab-4 HC | EVQLLESGGGLVQPGGSLRLSCAASGFTFSRHAMNWVRQAPG | 8 |
| | KGLEWVSGISGSGDETYYADSVKGRFTISRDNSKNTLYLQMN | |
| | SLRAEDTAVYYCARDLPASYYDSSGYYWHNGMDVWGQGTL | |
| | VTVSS | |
| Ab-5 LC | QSALTQPASVSGSPGQSITISCTGTSSDVGSYYLVSWYQQHPG | 9 |
| | KAPKLMIYEGDKRPSGVSNRFSGSKSGNTASLTISGLQAEDEA | |
| | DYYCCSHAGRYPYVFGGGTKLTVL | |
| Ab-5 HC | EVQLLESGGGLVQPGGSLRLSCAASGFMFSSYAMSWVRQAPG | 10 |
| | KGLEWVSAISGSGGSTYYTDSVKGRFTISRDNSKNTLYLQMNS | |
| | LRAEDTAVYYCAKDGASGWPNWHFDLWGQGTLVTVSS | |
| Ab-6 LC | QSALTQPASVSGSPGQSITISCTGTSSDVGSYSLVSWYQQHPGK | 11 |
| | APKLMIYEGTKRPSGVSNRFSGSKSGNTASLTISGLQAEDEAD | |
| | YYCCSYAGSYSYVVFGGGTKLTVL | |
| Ab-6 HC | EVQLLESGGGLVQPGGSLRLSCAASGFTFSNYAMSWVRQAPG | 12 |
| | KGLEWVSDISGSGGSTYYADSVKGRFTISRDNSKNTLYLQMNS | |
| | LRAEDTAVYYCVKGTIPIFGVIRSAFDYWGQGTLVTVSS | |
| Ab-7 LC | DIQMTQSPSSLSASVGDRVTITCRASQSIHTYLNWYQQKPGKA | 13 |
| | PKLLIYAASALASGVPSRFSGSGSGTDFTLTISSLQPEDFATYYC | |
| | QQSYSAPPYTFGQGTKVEIK | |
| Ab-7 HC | EVQLLESGGGLVQPGGSLRLSCAASGFTFSDFAMAWVRQAPG | 14 |
| | KGLEWVSAISGSGDITYYADSVKGRFTISRDNSKNTLYLQMNS | |
| | LRAEDTAVYYCAREADGLHSPWHFDLWGQGTLVTVSS | |
| Ab-8 HC | EVQLVESGGGLVQPGGSLRLSCAASGFNVNDYAMGWFRQAP | 15 |
| | GKEREFVAGITSSVGVTNYADSVKGRFTISADNSKNTAYLQM | |
| | NSLKPEDTAVYYCAADIFFVNVVGRGTLVTVSS | |
| Ab-9 HC | EVQLVESGGGLVQPGGSLRLSCAASGFTLDYYAMGWFRQAP | 61 |
| | GKEREFVAAINWSGDNTHYADSVKGRFTISADNSKNTAYLQM | |
| | NSLKPEDTAVYYCARAPFYCTTTKCQDNYYYMDVWGQGTLV | |
| | TVSS | |
| Ab-10 HC | EVQLVESGGGLVQPGGSLRLSCAASGGTFSSIGMGWFRQAPG | 62 |
| | KEREFVAAISWDGGATAYADSVKGRFTISADNSKNTAYLQMN | |
| | SLKPEDTAVYYCAKEDVGKPFDWGQGTLVTVSS | |
| Ab-11 | EVQLVESGGGLVQPGGSLRLSCAASGFTLGDYVMGWFRQAP | 63 |
| | GKEREFVAAIHSGGSTYADSVKGRFTISADNSKNTAYLQMNSL | |
| | KPEDTAVYYCAAKEYGGTRRYDRAYNWGQGTLVTVSS | |
| Ab-12 | EVQLVESGGGLVQPGGSLRLSCAASGGGTFGSYAMGWFRQAP | 64 |
| | GKERELVAAISSGGSTNYADSVKGRFTISADNSKNTAYLQMNS | |
| | LKPEDTAVYYCARGDWRYGWGQGTLVTVSS | |
| Ab-13 | EVQLVESGGGLVQPGGSLRLSCAASGRTYSISAMGWFRQAPG | 65 |
| | KEREFVAAISMSGDDSAYADSVKGRFTISADNSKNTAYLQMN | |
| | SLKPEDTAVYYCAAQLGYESGYSLTYDYDWGQGTLVTVSS | |
| Ab-14 | EVQLVESGGGLVQPGGSLRLSCAASGGTFSTYPMGWFRQAPG | 66 |
| | KEREFVAAITSDGSTLYADSVKGRFTISADNSKNTAYLQMNSL | |
| | KPEDTAVYYCAATDYNKAYAREGRRYDWGQGTLVTVSS | |
| Ab-15 | EVQLVESGGGLVQPGGSLRLSCAASGSIFRINAMGWFRQAPGK | 67 |
| | EREFVAAIHWSGSSTRYADSVKGRFTISADNSKNTAYLQMNSL | |
| | KPEDTAVYYCAAQDRRRGDYYTFDYHWGQGTLVTVSS | |
| Ab-16 | EVQLVESGGGLVQPGGSLRLSCAASGGTFNNYAMGWFRQAP | 68 |
| | GKERELVAAITSGGSTDYADSVKGRFTISADNSKNTAYLQMNS | |
| | LKPEDTAVYYCARGDWRYGWGQGTLVTVSS | |
| Ab-17 | EVQLVESGGGLVQPGGSLRLSCAASGTIVNINVMGWFRQAPG | 69 |
| | KEREFVAAIHWSGGLKAYADSVKGRFTISADNSKNTAYLQMN | |
| | SLKPEDTAVYYCAMNRAGIYEWGQGTLVTVSS | |
| Ab-18 | EVQLVESGGGLVQPGGSLRLSCAASGSTFSNYAMGWFRQAPG | 70 |
| | KERELVAAITSGGSTSYADSVKGRFTISADNSKNTAYLQMNSL | |
| | KPEDTAVYYCARGDWRYGWGQGTLVTVSS | |
| Ab-19 | EVQLVESGGGLVQPGGSLRLSCAASGFSFDDYVMGWFRQAPG | 71 |
| | KEREFVAAISRSGNLKSYADSVKGRFTISADNSKNTAYLQMNS | |
| | LKPEDTAVYYCAAKEYGGTRRYDRAYNWGQGTLVTVSS | |
| Ab-20 | EVQLVESGGGLVQPGGSLRLSCAASGSAFRSTVMGWFRQAPG | 72 |
| | KEREFVAAVIGSSGITDYADSVKGRFTISADNSKNTAYLQMNS | |
| | LKPEDTAVYYCARGDWRYGWGQGTLVTVSS | |
| Ab-21 | EVQLVESGGGLVQPGGSLRLSCAASGRTFSDAGMGWFRQAPG | 73 |
| | KEREFVAAISRSGNLKAYADSVKGRFTISADNSKNTAYLQMNS | |
| | LKPEDTAVYYCAVQVNGTWAWGQGTLVTVSS | |
| Ab-22 | EVQLVESGGGLVQPGGSLRLSCAASGFTLDYYAMGWFRQAP | 74 |
| | GKERELVAAISWNGGSTSYADSVKGRFTISADNSKNTAYLQM | |
| | NSLKPEDTAVYYCARGDWRYGWGQGTLVTVSS | |
| Ab-23 | EVQLVESGGGLVQPGGSLRLSCAASGGTFSTYVMGWFRQAPG | 75 |
| | KEREFVAAISWSGESTLYADSVKGRFTISADNSKNTAYLQMNS | |
| | LKPEDTAVYYCAADLMYGVDRRYDWGQGTLVTVSS | |
| Ab-24 | EVQLVESGGGLVQPGGSLRLSCAASGISSSKRNMGWFRQAPG | 76 |
| | KEREFVAGISWTGGITYYADSVKGRFTISADNSKNTAYLQMNS | |
| | LKPEDTAVYYCAIAGRGRWGQGTLVTVSS | |
| Ab-25 | EVQLVESGGGLVQPGGSLRLSCAASGRRFSAYGMGWFRQAPG | 77 |
| | KEREFVAVISRSGTLTRYADSVKGRFTISADNSKNTAYLQMNS | |
| | LKPEDTAVYYCASSGPADARNGERWHWGQGTLVTVSS | |
| Ab-26 | EVQLVESGGGLVQPGGSLRLSCAASGLTFSSFVMGWFRQAPG | 78 |
| | KEREFVAAISSNGGSTRYADSVKGRFTISADNSKNTAYLQMNS | |
| | LKPEDTAVYYCAAKEYGGTRRYDRAYNWGQGTLVTVSS | |
| Ab-27 | EVQLVESGGGLVQPGGSLRLSCAASGTVFSISAMGWFRQAPG | 79 |
| | KEREFVAAISMSGDDTAYADSVKGRFTISADNSKNTAYLQMN | |
| | SLKPEDTAVYYCAAQLGYESGYSLTYDYDWGQGTLVTVSS | |
| Ab-28 | EVQLVESGGGLVQPGGSLRLSCAASGSIFSPNVMGWFRQAPG | 80 |
| | KEREFVAAITNGGSTKYADSVKGRFTISADNSKNTAYLQMNSL | |
| | KPEDTAVYYCAAQRWRGGSYEWGQGTLVTVSS | |
| Ab-29 | EVQLVESGGGLVQPGGSLRLSCAASGIPASIRVMGWFRQAPGK | 81 |
| | EREFVAAIHWSGSSTRYADSVKGRFTISADNSKNTAYLQMNSL | |
| | KPEDTAVYYCALSRAIVPGDSEYDYRWGQGTLVTVSS | |
| Ab-30 | EVQLVESGGGLVQPGGSLRLSCAASGRTFSMSAMGWFRQAPG | 82 |
| | KEREFVSAISWSGGSTLYADSVKGRFTISADNSKNTAYLQMNS | |
| | LKPEDTAVYYCAAQLGYESGYSLTYDYDWGQGTLVTVSS | |
| Ab-31 | EVQLVESGGGLVQPGGSLRLSCAASGRTFSNYAMGWFRQAPG | 83 |
| | KERELVAAITSGGSTDYADSVKGRFTISADNSKNTAYLQMNSL | |
| | KPEDTAVYYCARGDWRYGWGQGTLVTVSS | |
| Ab-32 | EVQLVESGGGLVQPGGSLRLSCAASGRTFSSYAMGWFRQAPG | 84 |
| | KERELVAAISTGGSTYYADSVKGRFTISADNSKNTAYLQMNSL | |
| | KPEDTAVYYCARGDWRYGWGQGTLVTVSS | |
| Ab-33 | EVQLVESGGGLVQPGGSLRLSCAASGRSFSSVGMGWFRQAPG | 85 |
| | KEREFVAVISRSGASTAYADSVKGRFTISADNSKNTAYLQMNS | |
| | LKPEDTAVYYCASAGPADARNGERWAWGQGTLVTVSS | |
| Ab-34 | EVQLVESGGGLVQPGGSLRLSCAASGRAFRRYTMGWFRQAPG | 86 |
| | KERELIAVINWSGDRRYYADSVKGRFTISADNSKNTAYLQMN | |
| | SLKPEDTAVYYCAATLAKGGGRWGQGTLVTVSS | |
| Ab-35 | EVQLVESGGGLVQPGGSLRLSCAAMAWAGFARRRAKNAKW | 87 |
| | WRALPRGGPTYADSVKGRFTISADNSKNTAYLQMNSLKPEDT | |
| | AVYYCAAGGMWYGSSLYVRFDLLEDGMDWGQGTLVTVSS | |
| Ab-36 | EVQLVESGGGLVQPGGSLRLSCAASGSISSINGMGWFRQAPGK | 88 |
| | ERELVALISRSGGTTYYADSVKGRFTISADNSKNTAYLQMNSL | |
| | KPEDTAVYYCASAGPADARNGERWAWGQGTLVTVSS | |
| Ab-37 | EVQLVESGGGLVQPGGSLRLSCAASGRTFSNNVMGWFRQAPG | 89 |
| | KERELVAAAISGGSTYYADSVKGRFTISADNSKNTAYLQMNSL | |
| | KPEDTAVYYCARGDWRYGWGQGTLVTVSS | |
| Ab-38 | EVQLVESGGGLVQPGGSLRLSCAASGRTFSISAMGWFRQAPG | 90 |
| | KEREFVAAISRSGTTMYADSVKGRFTISADNSKNTAYLQMNSL | |
| | KPEDTAVYYCAAQLGYESGYSLTYDYDWGQGTLVTVSS | |
| Ab-39 | EVQLVESGGGLVQPGGSLRLSCAASGGTFSYYDLAAMGWFR | 91 |
| | QAPGKEREFVAAISWSQYNTKYADSVKGRFTISADNSKNTAY | |
| | LQMNSLKPEDTAVYYCAARVVVRTAHGFEDNWGQGTLVTVSS | |
| Ab-40 | EVQLVESGGGLVQPGGSLRLSCAASGRTFNNYGMGWFRQAP | 92 |
| | GKEREFVAVISRSGSLKAYADSVKGRFTISADNSKNTAYLQMN | |
| | SLKPEDTAVYYCASDPTYGSGRWTWGQGTLVTVSS | |
| Ab-41 | EVQLVESGGGLVQPGGSLRLNCAASGFTLDDYVMGWFRQTP | 93 |
| | GKEREFVAAISSSGALTSYADSVKGRFTISADNSKNTAYLQMN | |
| | SLKPEDAAVYYCAAKEYGGTRRYDRAYNWGQGTLVTVSS | |
| Ab-42 | EVQLVESGGGLVQPGGSLRLSCAASGRTFNAMGWFRQAPGKE | 94 |
| | REFVAAIRWSGDMSVYADSVKGRFTISADNSKNTAYLQMNSL | |
| | KPEDTAVYYCAAQDRRRGDYYTFDYHWGQGTLVTVSS | |
| Ab-43 | EVQLVESGGGLVQPGGSLRLSCAASGLTFSTYAMGWFRQAPG | 95 |
| | KEREFVAAITSGGSTDYADSVKGRFTISADNSKNTAYLQMNSL | |
| | KPEDTAVYYCARGDWRYGWGQGTLVTVSS | |
| Ab-44 | EVQLVESGGGLVQPGGSLRLSCAASGSIFTINAMGWFRQAPGK | 96 |
| | EREGVAAIGSDGSTSYADSVKGRFTISADNSKNTAYLQMNSLK | |
| | PEDTAVYYCAVVRWGADWGQGTLVTVSS | |
| Ab-45 | EVQLVESGGGLVQPGGSLRLSCAASGLTFSSYAMGWFRQAPG | 97 |
| | KERELVAAITSSSGSTPAYADSVKGRFTISADNSKNTAYLQMN | |
| | SLKPEDTAVYYCARGDWRYGWGQGTLVTVSS | |
| Ab-46 | EVQLVESGGGLVQPGGSLRLSCAASGIPFSTRTMGWFRQAPGK | 98 |
| | EREFVAAISWSQYNTKYADSVKGRFTISADNSKNTAYLQMNS | |
| | LKPEDTAVYYCAARHWGMFSRSENDYNWGQGTLVTVSS | |
| Ab-47 | EVQLVESGGGLVQPGGSLRLSCAASGRSRFSTYVMGWFRQAP | 99 |
| | GKEREFVAAISWSQYNTKYADSVKGRFTISADNSKNTAYLQM | |
| | NSLKPEDTAVYYCAAGNGGRNYGHSRARYDWGQGTLVTVSS | |
| Ab-48 | EVQLVESGGGLVQPGGSLRLSCAASGLTLSSYGMGWFRQAPG | 100 |
| | KEREYVAVISRSGSLKAYADSVKGRFTISADNSKNTAYLQMNS | |
| | LKPEDTAVYYCATRADAEGWWDWGQGTLVTVSS | |
| Ab-49 | EVQLVESGGGLVQPGGSLRLSCAASGSIFRVNVMGWFRQAPG | 101 |
| | KEREFVAAINNFGTTKYADSVKGRFTISADNSKNTAYLQMNSL | |
| | KPEDTAVYYCAADLPSRWGQGTLVTVSS | |
| Ab-50 | EVQLVESGGGLVQPGGSLRLSCAASGRTFRNYAMGWFRQAP | 102 |
| | GKERELVAAISSGGSTDYADSVKGRFTISADNSKNTAYLQMNS | |
| | LKPEDTAVYYCARGDWRYGWGQGTLVTVSS | |
| Ab-51 | EVQLVESGGGLVQPGGSLRLSCAASGRTFSSFAMGWFRQAPG | 103 |
| | KERELVAAISSGGSTNYADSVKGRFTISADNSKNTAYLQMNSL | |
| | KPEDTAVYYCARGDWRYGWGQGTLVTVSS | |
| Ab-52 | EVQLVESGGGLVQPGGSLRLSCAASGTTFRINAMGWFRQAPG | 104 |
| | KEREFVAAMNWSGGSTKYADSVKGRFTISADNSKNTAYLQM | |
| | NSLKPEDTAVYYCAAQDRRRGDYYTFDYHWGQGTLVTVSS | |
| Ab-53 | EVQLVESGGGLVQPGGSLRLSCAASGFTLGDYVMGWFRQAP | 105 |
| | GKEREFVAAIHSGGSTLYADSVKGRFTISADNSKNTAYLQMNS | |
| | LKPEDTAVYYCAAKEYGGTRRYDRTYNWGQGTLVTVSS | |
| Ab-54 | EVQLVESGGGLVQPGGSLRLSCAASGFTFSRSAMGWFRQAPG | 106 |
| | KERELVAGILSSGATVYADSVKGRFTISADNSKNTAYLQMNSL | |
| | KPEDTAVYYCAKAPRDWGQGTLVTVSS | |
| Ab-55 | EVQLVESGGGLVQPGGSLRLSCAASGRTFNNYAMGWFRQAP | 107 |
| | GKERELVAAITSGGSTDYADSVKGRFTISADNSKNTAYLQMNS | |
| | LKPEDTAVYYCARGDWRYGWGQGTLVTVSS | |
| Ab-56 | EVQLVESGGGLVQPGGSLRLSCAASGFTFRSYPMGWFRQAPG | 108 |
| | KEREFVAAINNFGTTKYADSVKGRFTISADNSKNTAYLQMNSL | |
| | KPEDTAVYYCAAAKGIGVYGWGQGTLVTVSS | |
| Ab-57 | EVQLVESGGGLVQPGGSLRLSCAASGNIFTRNVMGWFRQAPG | 109 |
| | KEREFVAAIHWNGDSTKYADSVKGRFTISADNSKNTAYLQMN | |
| | SLKPEDTAVYYCAAGSNIGGSRWRYDWGQGTLVTVSS | |
| Ab-58 | EVQLVESGGGLVQPGGSLRLSCAASGRTISRYTMGWFRQAPG | 110 |
| | KERELVAAIKWSGASTVYADSVKGRFTISADNSKNTAYLQMN | |
| | SLKPEDTAVYYCAAKGIWDYLGRRDFGDWGQGTLVTVSS | |
| Ab-59 | EVQLVESGGGLVQPGGSLRLSCAASGFRFSSYGMGWFRQAPG | 111 |
| | KEREFVAIITSGGLTVYADSVKGRFTISADNSKNTAYLQMNSL | |
| | KPEDTAVYYCAARKTFYFGTSSYPNDYAWGQGTLVTVSS | |
| Ab-60 | EVQLVESGGGLVQPGGSLRLSCAASGRTFDNHAMGWFRQAP | 112 |
| | GKEREGVAAIGSDGSTSYADSVKGRFTISADNSKNTAYLQMN | |
| | SLKPEDTAVYYCAVVRWGVDWGQGTLVTVSS | |
| Ab-61 | EVQLVESGGGLVQPGGSLRLSCAASGFTFSSHAMGWFRQAPG | 113 |
| | KEREFVAGISWSGESTLTRYADSVKGRFTISADNSKNTAYLQM | |
| | NSLKPEDTAVYYCADVNGDWGQGTLVTVSS | |
| Ab-62 | EVQLVESGGGLVQPGGSLRLSCAASGMTFRLYAMGWFRQAP | 114 |
| | GKEREFVAAISWSQYNTKYADSVKGRFTISADNSKNTAYLQM | |
| | NSLKPEDTAVYYCAAQLGYESGYSLTYDYDWGQGTLVTVSS | |
| Ab-63 | EVQLVESGGGLVQPGGSLRLSCAASGGTFRKLAMGWFRQAPG | 115 |
| | KEREFVAVISWTGGSSYYADSVKGRFTISADNSKNTAYLQMN | |
| | SLKPEDTAVYYCARLTSFATWGQGTLVTVSS | |
| Ab-64 | EVQLVESGGGLVQPGGSLRLSCAASGRTFSANGMGWFRQAPG | 116 |
| | KEREFVAAISASGTLRAYADSVKGRFTISADNSKNTAYLQMNS | |
| | LKPEDTAVYYCAARSPMSPTWDWGQGTLVTVSS | |
| Ab-65 | EVQLVESGGGLVQPGGSLRLSCAASGSAFRSTVMGWFRQAPG | 117 |
| | KEREFVAAISWTGESTLYADSVKGRFTISADNSKNTAYLQMNS | |
| | LKPEDTAVYYCATGPYRSYFARSYLWGQGTLVTVSS | |
| Ab-66 | EVQLVESGGGLVQPGGSLRLSCAASGGTFDYSGMGWFRQAPG | 118 |
| | KEREFVAVVSQSGRTTYYADSVKGLFTITADNSKNTAYLQMN | |
| | LLKPEDTAVYYCPTATRPGEWDGGQGTLVTVSR | |
| Ab-67 | EVQLVESGGGLVQPGGSLRLSCAASGVFGPIRAMGWFRQAPG | 119 |
| | KERELVALMGNDGSTYADSVKGRFTISADNSKNTAYLQMNSL | |
| | KPEDTAVYYCAAIGWRWGQGTLVTVSS | |
| Ab-68 | EVQLVESGGGLVQPGGSLRLSCAASGFNFNWYPMGWFRQAP | 120 |
| | GKEREFVAAIRWSGGITYYADSVKGRFTISADNSKNTAYLQM | |
| | NSLKPEDTAVYYCATGPYRSYFARSYLWGQGTLVTVSS | |
| Ab-69 | EVQLVESGGGLVQPGGSLRLSCAASGMTFHRYVMGWFRQAP | 121 |
| | GKERELVASITTGGTPNYADSVKGRFTIITDNNKNTAYLLMINL | |
| | QPEDTAVYYCCKVPYIWGQGTLGTVGT | |
| Ab-70 | EVQLVESGGGLVQPGGSLRLSCAASGISTMGWFRQAPGKERE | 122 |
| | FVAAINNFGTTKYADSVKGRFTISADNSKNTAYLQMNSLKPED | |
| | TAVYYCAAASQSGSGYDWGQGTLVTVSS | |
| Ab-71 | EVQLVESGGGLVQPGGSLRLSCAASGRAFNTRAMGWFRQAP | 123 |
| | GKERELVALMGNDGSTYADSVKGRFTISADNSKNTAYLQMNS | |
| | LKPEDTAVYYCAAIGWRWGQGTLVTVSS | |
| Ab-72 | EVQLVESGGGLVQPGGSLRLSCAASGLTDRRYTMGWFRQAPG | 124 |
| | KEREFVAAINSGGSTLYADSVKGRFTISADNSKNTAYLQMNSL | |
| | KPEDTAVYYCAAGNGGRTYGHSRARYEWGQGTLVTVSS | |
| Ab-73 | EVQLVESGGGLVQPGGSLRLSCAASGRTFNVMGWFRQAPGKE | 125 |
| | RELVALMGNDGSTYADSVKGRFTISADNSKNTAYLQMNSLKP | |
| | EDTAVYYCAAVRWGVDWGQGTLVTVSS | |
| Ab-74 | EVQLVESGGGLVQPGGSLRLSCAASGRAFNTRAMGWFRQAP | 126 |
| | GKERELVALMGNDGSTNYADSVKGRFTISADNSKNTAYLQM | |
| | NSLKPEDTAVYYCAAIGWRWGQGTLVTVSS | |
| Ab-75 | EVQVVESGGGVVHPGGSVRMRCAASGVTVDYSGMGWFGQA | 127 |
| | PGKEREFVAVVSQSARTTYYADSVKGRFTISADNSKNTEYLQ | |
| | MNSMKPEDTAVYYCATATRPGEWDWGQGTLVTVSS | |
| Ab-76 | EVQLVESGGGLVQPGGSLRLSCAASGRTPRLGAMGWFRQAPG | 128 |
| | KEREFVAAISRSGGLTSYADSVKGRFTISADNSKNTAYLQMNS | |
| | LKPEDTAVYYCAAQLVGSNIGGSRWRYDWGQGTLVTVSS | |
| Ab-77 | EVQLVESGGGLVQPGGSLRLSCAASGLTFRNYAMGWFRQAPG | 129 |
| | KEREFVAAITSGGSTLYADSVKGRFTISADNSKNTAYLQMNSL | |
| | KPEDTAVYYCARGDWRYGWGHGTLVTESS | |
| Ab-78 | EVQLVESGGGLVQPGGSLRLSCAASGGRTFSDLAMGWFRQAP | 130 |
| | GKEREFVALITRSGGTTFYADSVKGRFTISADNSKNTAYLQMN | |
| | SLKPEDTAVYYCAIGRGSWGQGTLVTVSS | |
| Ab-79 | EVQLVESGGGLVQPGGSLRLSCAASGFTFGEYAMGWFRQAPG | 131 |
| | KEREFVAAVSSLGPFTRYADSVKGRFTISADNSKNTAYLQMNS | |
| | LKPEDTAVYYCAAVLDGYSGSWGQGTLVTVSS | |
| Ab-80 | EVQLVESGGGLVQPGGSLRLSCAASGFAFSSYGMGWFRQAPG | 132 |
| | KEREFVAAISWSGVRSGVSAIYADSVKGRFTISADNSKNTAYL | |
| | QMNSLKPEDTAVYYCTTDLTGDLWYFDLWGQGTLVTVSS | |
| Ab-81 | EVQLVESGGGLVQPGGSLRLSCAASGLTAGTYAMCWFRQAP | 133 |
| | GKEREGVACASSTDGSTAYADSVKGRFTISADNSKNTAYLQM | |
| | NSLKPEDTAVYYCAAVRTYGSATYDWGQGTLVTVSS | |
| Ab-82 | EVQLVESGGGLVQPGGSLRLSCAASGFTLDDYVMGWFRQAP | 134 |
| | GKERELVAAVSSLGPFTRYADSVKGRFTISADNSKNTAYLQM | |
| | NSLKPEDTAVYYCAAKEYGGTRRYDRAYNWGQGTLVTVSS | |
| Ab-83 | EVQLVESGGGLVQPGGSLRLSCAASGPTLGSYVMGWFRQAPG | 135 |
| | KEREFVAAISWSQYNTKYADSVKGRFTISADNSKNTAYLQMN | |
| | SLKPEDTAVYYCAAQRWRGGSYEWGQGTLVTVSS | |
| Ab-84 | EVQLVESGGGLVQPGGSLRLSCAASGPTFSSYVMGWFRQAPG | 136 |
| | KEREFVAAISWSQYNTKYADSVKGRFTISADNSKNTAYLQMN | |
| | SLKPEDTAVYYCAAASRSGSGYDWGQGTLVTVSS | |
| Ab-85 | EVQLVESGGGLVQPGGSLRLSCAASGYLYSKDCMGWFRQAP | 137 |
| | GKEREGVATICTGDGSTAYADSVKGRFTISADNSKNTAYLQM | |
| | NSLKPEDTAVYYCAVIAYEEGVYRWDWGQGTLVTVSS | |
| Ab-86 | EVQLVESGGGLVQPGGSLRLSCAASGFTIDDYAMGWFRQAPG | 138 |
| | KEREGVAAISGSGDDTYYADSVKGRFTISADNSKNTAYLQMN | |
| | SLKPEDTAVYYCAKLPYVSGDYWGQGTLVTVSS | |
| Ab-87 | EVQLVESGGGLVQPGGSLRLSCAASGGRFSDYGMGWFRQAP | 139 |
| | GKERELVALISRSGNLKSYADSVKGRFTISADNSKNTAYLQMN | |
| | SLKPEDTAVYYCAAKTGTSFVWGQGTLVTVSS | |
| Ab-88 | EVQLVESGGGLVQPGGSLRLSCAASGLSFSNYAMGWFRQAPG | 140 |
| | KERELVAAITSGGSTDYADSVKGRFTISADNSKNTAYLQMNSL | |
| | KPEDTAVYYCARGDWRYGWGQGTLVTVSS | |
| Ab-89 | EVQLVESGGGLVQPGGSLRLSCAASGIPSTLRAMGWFRQAPG | 141 |
| | KEREFVALINRSGGSQFYADSVKGRFTISADNSKNTAYLQMNS | |
| | LKPEDTAVYYCAIGRGSWGQGTLVTVSS | |

[0071] In some embodiments, the sequence comprises at least or about 70%, 80%, 85%, 90%, 91%, 92%, 93%, 94%, 95%, 96%, 97%, 98%, 99%, or 100% sequence identity to any one of SEQ ID NOs: 1-4212. In some instances, the sequence comprises at least or about 95% homology to any one of SEQ ID NOs: 1-4212. In some instances, the sequence comprises at least or about 97% homology to any one of SEQ ID NOs: 1-4212. In some instances, the sequence comprises at least or about 99% homology to any one of SEQ ID NOs: 1-4212. In some instances, the sequence comprises at least or about 100% homology to any one of SEQ ID NOs: 1-4212. In some instances, the sequence comprises at least a portion having at least or about 10, 20, 30, 40, 50, 60, 70, 80, 90, 100, 110, or more than 110 amino acids of any one of SEQ ID NOs: 1-4212.

[0072] Described herein, in some embodiments, are antibodies or antibody fragments comprising a variable domain, heavy chain region (VH) and a variable domain, light chain region (VL), wherein the VH comprises an amino acid sequence at least about 90% identical to a sequence as set forth in any one of SEQ ID NOs: 2927-3998, and wherein the VL comprises an amino acid sequence at least about 90% identical to a sequence as set forth in any one of SEQ ID NOs: 3999-4174. In some instances, the antibodies or antibody fragments comprise VH comprising at least or about 70%, 80%, 85%, 90%, 91%, 92%, 93%, 94%, 95%, 96%, 97%, 98%, 99%, or 100% sequence identity to any one of SEQ ID NOs: 2927-3998, and VL comprising at least or about 70%, 80%, 85%, 90%, 91%, 92%, 93%, 94%, 95%, 96%, 97%, 98%, 99%, or 100% sequence identity to any one of SEQ ID NOs: 3999-4174.

[0073] Described herein, in some embodiments, are antibodies or antibody fragments comprising a variable domain, heavy chain region (VH), wherein the VH comprises an amino acid sequence at least about 90% identical to a sequence as set forth in any one of SEQ ID NOs: 2927-3998. In some instances, the antibodies or antibody fragments comprise VH comprising at least or about 70%, 80%, 85%, 90%, 91%, 92%, 93%, 94%, 95%, 96%, 97%, 98%, 99%, or 100% sequence identity to any one of SEQ ID NOs: 2927-3998.

[0074] Described herein, in some embodiments, are antibodies or antibody fragments comprising a variable domain, light chain region (VL), wherein the VL comprises an amino acid sequence at least about 90% identical to a sequence as set forth in any one of SEQ ID NOs: 3999-4174. In some instances, the antibodies or antibody fragments comprise VL comprising at least or about 70%, 80%, 85%, 90%, 91%, 92%, 93%, 94%, 95%, 96%, 97%, 98%, 99%, or 100% sequence identity to any one of SEQ ID NOs: 3999-4174.

[0075] In some instances, an antibody described herein comprises a heavy chain variable domain complementarity determining region (CDRH) sequence as listed in Table 2. In some instances, an antibody described herein comprises a CDRH1 sequence of any one of SEQ ID NOs: 16, 19, 22, 25, 28, 31, 34, 37, 142 or 146. In some instances, an antibody described herein comprises a sequence that is at least 80% identical to a CDRH1 sequence of any one of SEQ ID NOs: 16, 19, 22, 25, 28, 31, 34, 37, 142 or 146. In some instances, an antibody described herein comprises a sequence that is at least 85% identical to a CDRH1 sequence of any one of SEQ ID NOs: 16, 19, 22, 25, 28, 31, 34, 37, 142 or 146. In some instances, an antibody described herein comprises a sequence that is at least 90% identical to a CDRH1 sequence of any one of SEQ ID NOs: 16, 19, 22, 25, 28, 31, 34, 37, 142 or 146. In some instances, an antibody described herein comprises a sequence that is at least 95% identical to a CDRH1 sequence of any one of SEQ ID NOs: 16, 19, 22, 25, 28, 31, 34, 37, 142 or 146. In some instances, an antibody described herein comprises a CDRH2 sequence of any one of SEQ ID NOs: 17, 20, 23, 26, 29, 32, 35, 38, 143 or 146. In some instances, an antibody described herein comprises a sequence that is at least 80% identical to a CDRH2 sequence of any one of SEQ ID NOs: 17, 20, 23, 26, 29, 32, 35, 38, 143 or 146. In some instances, an antibody described herein comprises a sequence that is at least 85% identical to a CDRH2 sequence of any one of SEQ ID NOs: 17, 20, 23, 26, 29, 32, 35, 38, 143 or 146. In some instances, an antibody described herein comprises a sequence that is at least 90% identical to a CDRH2 sequence of any one of SEQ ID NOs: 17, 20, 23, 26, 29, 32, 35, 38, 143 or 146. In some instances, an antibody described herein comprises a sequence that is at least 95% identical to a CDRH2 sequence of any one of SEQ ID NOs: 17, 20, 23, 26, 29, 32, 35, 38, 143 or 146. In some instances, an antibody described herein comprises a CDRH3 sequence of any one of SEQ ID NOs: 18, 21, 24, 27, 30, 33, 36, 39, 144 or 147. In some instances, an antibody described herein comprises a sequence that is at least 80% identical to a CDRH3 sequence of any one of SEQ ID NOs: 18, 21, 24, 27, 30, 33, 36, 39, 144 or 147. In some instances, an antibody described herein comprises a sequence that is at least 85% identical to a CDRH3 sequence of any one of SEQ ID NOs: 18, 21, 24, 27, 30, 33, 36, 39, 144 or 147. In some instances, an antibody described herein comprises a sequence that is at least 90% identical to a CDRH3 sequence of any one of SEQ ID NOs: 18, 21, 24, 27, 30, 33, 36, 39, 144 or 147. In some instances, an antibody described herein comprises a sequence that is at least 95% identical to a CDRH3 sequence of any one of SEQ ID NOs: 18, 21, 24, 27, 30, 33, 36, 39, 144 or 147.

TABLE 2
SARS-CoV-2 Variant Heavy Chain Variable Domain
Complementarity Determining Regions (CDR)

| Construct | Amino Acid | SEQ ID |
|---|---|---|
| Description | Sequence | NO: |
| Ab-1 CDRH1 | FTFSNYPMN | 16 |
| Ab-1 CDRH2 | STISGSGGNTFYA | 17 |
| Ab-1 CDRH3 | CVRHDEYSFDYW | 18 |
| Ab-2 CDRH1 | ITFSSYAMS | 19 |
| Ab-2 CDRH2 | SGISGSGGSTYYA | 20 |
| Ab-2 CDRH3 | CAKHGSGTIFGVVIAKYYFDYW | 21 |
| Ab-3 CDRH1 | FTFSRHAMN | 22 |
| Ab-3 CDRH2 | SGITGSGDETYYA | 23 |
| Ab-3 CDRH3 | CARDLPASYYDSSGYYWHNGMDVW | 24 |
| Ab-4 CDRH1 | FTFSRHAMN | 25 |
| Ab-4 CDRH2 | SGISGSGDETYYA | 26 |
| Ab-4 CDRH3 | CARDLPASYYDSSGYYWHNGMDVW | 27 |
| Ab-5 CDRH1 | FMFSSYAMS | 28 |
| Ab-5 CDRH2 | SAISGSGGSTYYT | 29 |
| Ab-5 CDRH3 | CAKDGASGWPNWHFDLW | 30 |
| Ab-6 CDRH1 | FTFSNYAMS | 31 |
| Ab-6 CDRH2 | SDISGSGGSTYYA | 32 |
| Ab-6 CDRH3 | CVKGTIPIFGVIRSAFDYW | 33 |
| Ab-7 CDRH1 | FTFSDFAMA | 34 |
| Ab-7 CDRH2 | SAISGSGDITYYA | 35 |
| Ab-7 CDRH3 | CAREADGLHSPWHFDLW | 36 |
| Ab-8 CDRH1 | FNVNDYAMG | 37 |
| Ab-8 CDRH2 | AGITSSVGVTNYA | 38 |
| Ab-8 CDRH3 | CAADIFFVNW | 39 |
| Ab-9 CDRH1 | FTLDYYAMG | 142 |
| Ab-9 CDRH2 | AAINWSGDNTHYA | 143 |
| Ab-9 CDRH3 | CARAPFYCTTTKCQDNYYYMDVW | 144 |
| Ab-10 CDRH1 | GTFSSIGMG | 145 |
| Ab-10 CDRH2 | AAISWDGGATAYA | 146 |
| Ab-10 CDR-H3 | CAKEDVGKPFDW | 147 |

[0076] In some instances, an antibody described herein comprises a heavy chain variable domain complementarity determining region (CDRH) sequence as listed in Table 2. In some instances, an antibody described herein comprises a CDRH1 sequence of any one of SEQ ID NOs: 148-882. In some instances, an antibody described herein comprises a sequence that is at least 80% identical to a CDRH1 sequence of any one of SEQ ID NOs: 148-882. In some instances, an antibody described herein comprises a sequence that is at least 85% identical to a CDRH1 sequence of any one of SEQ ID NOs: 148-882. In some instances, an antibody described herein comprises a sequence that is at least 90% identical to a CDRH1 sequence of any one of SEQ ID NOs: 148-882. In some instances, an antibody described herein comprises a sequence that is at least 95% identical to a CDRH1 sequence of any one of SEQ ID NOs: 148-882. In some instances, an antibody described herein comprises a CDRH2 sequence of any one of SEQ ID NOs: 883-1617. In some instances, an antibody described herein comprises a sequence that is at least 80% identical to a CDRH2 sequence of any one of SEQ ID NOs: 883-1617. In some instances, an antibody described herein comprises a sequence that is at least 85% identical to a CDRH2 sequence of any one of SEQ ID NOs: 883-1617. In some instances, an antibody described herein comprises a sequence that is at least 90% identical to a CDRH2 sequence of any one of SEQ ID NOs: 883-1617. In some instances, an antibody described herein comprises a sequence that is at least 95% identical to a CDRH2 sequence of any one of SEQ ID NOs: 883-1617. In some instances, an antibody described herein comprises a CDRH3 sequence of any one of SEQ ID NOs: 1618-2416 or 4177-4212. In some instances, an antibody described herein comprises a sequence that is at least 80% identical to a CDRH3 sequence of any one of SEQ ID NOs: 1618-2416 or 4177-4212. In some instances, an antibody described herein comprises a sequence that is at least 85% identical to a CDRH3 sequence of any one of SEQ ID NOs: 1618-2416 or 4177-4212. In some instances, an antibody described herein comprises a sequence that is at least 90% identical to a CDRH3 sequence of any one of SEQ ID NOs: 1618-2416 or 4177-4212. In some instances, an antibody described herein comprises a sequence that is at least 95% identical to a CDRH3 sequence of any one of SEQ ID NOs: 1618-2416 or 4177-4212.

[0077] In some instances, an antibody described herein comprises a light chain variable domain complementarily determining region (CDRL) sequence as listed in Table 3. In some instances, an antibody described herein comprises a CDRL1 sequence of any one of SEQ ID NOs: 40, 43, 46, 49, 52, 55, or 58. In some instances, an antibody described herein comprises a sequence that is at least 80% identical to a CDRL1 sequence of any one of SEQ ID NOs: 40, 43, 46, 49, 52, 55, or 58. In some instances, an antibody described herein comprises a sequence that is at least 85% identical to a CDRL1 sequence of any one of SEQ ID NOs: 40, 43, 46, 49, 52, 55, or 58. In some instances, an antibody described herein comprises a sequence that is at least 90% identical to a CDRL1 sequence of any one of SEQ ID NOs: 40, 43, 46, 49, 52, 55, or 58. In some instances, an antibody described herein comprises a sequence that is at least 95% identical to a CDRL1 sequence of any one of SEQ ID NOs: 40, 43, 46, 49, 52, 55, or 58. In some instances, an antibody described herein comprises a CDRL2 sequence of any one of SEQ ID NOs: 41, 44, 47, 50, 53, 56, or 59. In some instances, an antibody described herein comprises a sequence that is at least 80% identical to a CDRL2 sequence of any one of SEQ ID NOs: 41, 44, 47, 50, 53, 56, or 59. In some instances, an antibody described herein comprises a sequence that is at least 85% identical to a CDRL2 sequence of any one of SEQ ID NOs: 41, 44, 47, 50, 53, 56, or 59. In some instances, an antibody described herein comprises a sequence that is at least 90% identical to a CDRL2 sequence of any one of SEQ ID NOs: 41, 44, 47, 50, 53, 56, or 59. In some instances, an antibody described herein comprises a sequence that is at least 95% identical to a CDRL2 sequence of any one of SEQ ID NOs: 41, 44, 47, 50, 53, 56, or 59. In some instances, an antibody described herein comprises a CDRL3 sequence of any one of SEQ ID NOs: 42, 45, 48, 51, 54, 57, or 60. In some instances, an antibody described herein comprises a sequence that is at least 80% identical to a CDRL3 sequence of any one of SEQ ID NOs: 42, 45, 48, 51, 54, 57, or 60. In some instances, an antibody described herein comprises a sequence that is at least 85% identical to a CDRL3 sequence of any one of SEQ ID NOs: 42, 45, 48, 51, 54, 57, or 60. In some instances, an antibody described herein comprises a sequence that is at least 90% identical to a CDRL3 sequence of any one of SEQ ID NOs: 42, 45, 48, 51, 54, 57, or 60. In some instances, an antibody described herein comprises a sequence that is at least 95% identical to a CDRL3 sequence of any one of SEQ ID NOs: 42, 45, 48, 51, 54, 57, or 60.

TABLE 3
SARS-CoV-2 S1 Variant Light Chain Variable
Domain Complementarity Determining Regions (CDR)

| Construct | | SEQ ID |
|---|---|---|
| Description | Amino Acid Sequence | NO: |
| Ab-1 CDRL1 | RASQSIGNYLN | 40 |
| Ab-1 CDRL2 | GVSSLQS | 41 |
| Ab-1 CDRL3 | CQQSHSAPLTF | 42 |
| Ab-2 CDRL1 | TGTSSDVGHYNLVS | 43 |
| Ab-2 CDRL2 | EGTKRPS | 44 |
| Ab-2 CDRL3 | CCSYAGSSSFVVF | 45 |
| Ab-3 CDRL1 | RASQTINTFLN | 46 |
| Ab-3 CDRL2 | SASTLQS | 47 |
| Ab-3 CDRL3 | CQQSYSTFTF | 48 |
| Ab-4 CDRL1 | RASQTINTYLN | 49 |
| Ab-4 CDRL2 | SASTLQS | 50 |
| Ab-4 CDRL3 | CQQSYSTFTF | 51 |
| Ab-5 CDRL1 | TGTSSDVGSYYLVS | 52 |
| Ab-5 CDRL2 | EGDKRPS | 53 |
| Ab-5 CDRL3 | CCSHAGRYPYVF | 54 |
| Ab-6 CDRL1 | TGTSSDVGSYSLVS | 55 |
| Ab-6 CDRL2 | EGTKRPS | 56 |
| Ab-6 CDRL3 | CCSYAGSYSYVVF | 57 |
| Ab-7 CDRL1 | RASQSIHTYLN | 58 |
| Ab-7 CDRL2 | AASALAS | 59 |
| Ab-7 CDRL3 | CQQSYSAPPYTF | 60 |

[0078] In some instances, an antibody described herein comprises a light chain variable domain complementarity determining region (CDRL) sequence as listed in Table 3. In some instances, an antibody described herein comprises a CDRL1 sequence of any one of SEQ ID NOs: 2417-2586. In some instances, an antibody described herein comprises a sequence that is at least 80% identical to a CDRL1 sequence of any one of SEQ ID NOs: 2417-2586. In some instances, an antibody described herein comprises a sequence that is at least 85% identical to a CDRL1 sequence of any one of SEQ ID NOs: 2417-2586. In some instances, an antibody described herein comprises a sequence that is at least 90% identical to a CDRL1 sequence of any one of SEQ ID NOs: 2417-2586. In some instances, an antibody described herein comprises a sequence that is at least 95% identical to a CDRL1 sequence of any one of SEQ ID NOs: 2417-2586. In some instances, an antibody described herein comprises a CDRL2 sequence of any one of SEQ ID NOs: 2587-2756. In some instances, an antibody described herein comprises a sequence that is at least 80% identical to a CDRL2 sequence of any one of SEQ ID NOs: 2587-2756. In some instances, an antibody described herein comprises a sequence that is at least 85% identical to a CDRL2 sequence of any one of SEQ ID NOs: 2587-2756. In some instances, an antibody described herein comprises a sequence that is at least 90% identical to a CDRL2 sequence of any one of SEQ ID NOs: 2587-2756. In some instances, an antibody described herein comprises a sequence that is at least 95% identical to a CDRL2 sequence of any one of SEQ ID NOs: 2587-2756. In some instances, an antibody described herein comprises a CDRL3 sequence of any one of SEQ ID NOs: 2757-2926. In some instances, an antibody described herein comprises a sequence that is at least 80% identical to a CDRL3 sequence of any one of SEQ ID NOs: 2757-2926. In some instances, an antibody described herein comprises a sequence that is at least 85% identical to a CDRL3 sequence of any one of SEQ ID NOs: 2757-2926. In some instances, an antibody described herein comprises a sequence that is at least 90% identical to a CDRL3 sequence of any one of SEQ ID NOs: 2757-2926. In some instances, an antibody described herein comprises a sequence that is at least 95% identical to a CDRL3 sequence of any one of SEQ ID NOs: 2757-2926.

[0079] The term “sequence identity” means that two polynucleotide sequences are identical (i.e., on a nucleotide-by-nucleotide basis) over the window of comparison. The term “percentage of sequence identity” is calculated by comparing two optimally aligned sequences over the window of comparison, determining the number of positions at which the identical nucleic acid base (e.g., A, T, C, G, U, or I) occurs in both sequences to yield the number of matched positions, dividing the number of matched positions by the total number of positions in the window of comparison (i.e., the window size), and multiplying the result by 100 to yield the percentage of sequence identity. Alignment for purposes of determining percent amino acid sequence identity can be achieved in various ways that are within the skill in the art, for instance, using publicly available computer software such as EMBOSS MATCHER, EMBOSS WATER, EMBOSS STRETCHER, EMBOSS NEEDLE, EMBOSS LALIGN, BLAST, BLAST-2, ALIGN or Megalign (DNASTAR) software. Those skilled in the art can determine appropriate parameters for measuring alignment, including any algorithms needed to achieve maximal alignment over the full length of the sequences being compared.

[0080] In situations where ALIGN-2 is employed for amino acid sequence comparisons, the % amino acid sequence identity of a given amino acid sequence A to, with, or against a given amino acid sequence B (which can alternatively be phrased as a given amino acid sequence A that has or comprises a certain % amino acid sequence identity to, with, or against a given amino acid sequence B) is calculated as follows: 100 times the fraction X/Y, where X is the number of amino acid residues scored as identical matches by the sequence alignment program ALIGN-2 in that program's alignment of A and B, and where Y is the total number of amino acid residues in B. It will be appreciated that where the length of amino acid sequence A is not equal to the length of amino acid sequence B, the % amino acid sequence identity of A to B will not equal the % amino acid sequence identity of B to A. Unless specifically stated otherwise, all % amino acid sequence identity values used herein are obtained as described in the immediately preceding paragraph using the ALIGN-2 computer program.

[0081] The term “homology” or “similarity” between two proteins is determined by comparing the amino acid sequence and its conserved amino acid substitutes of one protein sequence to the second protein sequence. Similarity may be determined by procedures which are well-known in the art, for example, a BLAST program (Basic Local Alignment Search Tool at the National Center for Biological Information).

[0082] The terms “complementarity determining region,” and “CDR,” which are synonymous with “hypervariable region” or “HVR,” are known in the art to refer to non-contiguous sequences of amino acids within antibody variable regions, which confer antigen specificity and/or binding affinity. In general, there are three CDRs in each heavy chain variable region (CDRH1, CDRH2, CDRH3) and three CDRs in each light chain variable region (CDRL1, CDRL2, CDRL3). “Framework regions” and “FR” are known in the art to refer to the non-CDR portions of the variable regions of the heavy and light chains. In general, there are four FRs in each full-length heavy chain variable region (FR-H1, FR-H2, FR-H3, and FR-H4), and four FRs in each full-length light chain variable region (FR-L1, FR-L2, FR-L3, and FR-L4). The precise amino acid sequence boundaries of a given CDR or FR can be readily determined using any of a number of well-known schemes, including those described by Kabat et al. (1991), “Sequences of Proteins of Immunological Interest,” 5th Ed. Public Health Service, National Institutes of Health, Bethesda, Md. (“Kabat” numbering scheme), Al-Lazikani et al., (1997) JMB 273, 927-948 (“Chothia” numbering scheme); MacCallum et al., J. Mol. Biol. 262:732-745 (1996), “Antibody-antigen interactions: Contact analysis and binding site topography,” J. Mol. Biol. 262, 732-745.” (“Contact” numbering scheme); Lefranc M P et al., “IMGT unique numbering for immunoglobulin and T cell receptor variable domains and Ig superfamily V-like domains,” Dev Comp Immunol, 2003 January; 27(1):55-77 (“IMGT” numbering scheme); Honegger A and Plückthun A, “Yet another numbering scheme for immunoglobulin variable domains: an automatic modeling and analysis tool,” J Mol Biol, 2001 Jun. 8; 309(3):657-70, (“Aho” numbering scheme); and Whitelegg N R and Rees A R, “WAM: an improved algorithm for modelling antibodies on the WEB,” Protein Eng. 2000 December; 13(12):819-24 (“AbM” numbering scheme. In certain embodiments the CDRs of the antibodies described herein can be defined by a method selected from Kabat, Chothia, IMGT, Aho, AbM, or combinations thereof.

[0083] The boundaries of a given CDR or FR may vary depending on the scheme used for identification. For example, the Kabat scheme is based on structural alignments, while the Chothia scheme is based on structural information. Numbering for both the Kabat and Chothia schemes is based upon the most common antibody region sequence lengths, with insertions accommodated by insertion letters, for example, “30a,” and deletions appearing in some antibodies. The two schemes place certain insertions and deletions (“indels”) at different positions, resulting in differential numbering. The Contact scheme is based on analysis of complex crystal structures and is similar in many respects to the Chothia numbering scheme.

[0084] Antibodies used with the devices and systems as described herein may comprise improved binding affinity. In some instances, the SARS-CoV-2 antibody comprises a binding affinity (e.g., K_{D}) to SARS-CoV-2 of less than 1 nM, less than 1.2 nM, less than 2 nM, less than 5 nM, less than 10 nM, less than 11 nm, less than 13.5 nM, less than 15 nM, less than 20 nM, less than 25 nM, or less than 30 nM. In some instances, the SARS-CoV-2 antibody comprises a K_{D} of less than 1 nM. In some instances, the SARS-CoV-2 antibody comprises a K_{D} of less than 1.2 nM. In some instances, the SARS-CoV-2 antibody comprises a K_{D} of less than 2 nM. In some instances, the SARS-CoV-2 antibody comprises a K_{D} of less than 5 nM. In some instances, the SARS-CoV-2 antibody comprises a K_{D} of less than 10 nM. In some instances, the SARS-CoV-2 antibody comprises a K_{D} of less than 13.5 nM. In some instances, the SARS-CoV-2 antibody comprises a K_{D} of less than 15 nM. In some instances, the SARS-CoV-2 antibody comprises a K_{D} of less than 20 nM. In some instances, the SARS-CoV-2 antibody comprises a K_{D} of less than 25 nM. In some instances, the SARS-CoV-2 antibody comprises a K_{D} of less than 30 nM.

[0085] In some instances, the ACE2 antibody comprises a binding affinity (e.g., K_{D}) to ACE2 of less than 1 nM, less than 1.2 nM, less than 2 nM, less than 5 nM, less than 10 nM, less than 11 nm, less than 13.5 nM, less than 15 nM, less than 20 nM, less than 25 nM, or less than 30 nM. In some instances, the ACE2 antibody comprises a K_{D} of less than 1 nM. In some instances, the ACE2 antibody comprises a K_{D} of less than 1.2 nM. In some instances, the ACE2 antibody comprises a K_{D} of less than 2 nM. In some instances, the ACE2 antibody comprises a K_{D} of less than 5 nM. In some instances, the ACE2 antibody comprises a K_{D} of less than 10 nM. In some instances, the ACE2 antibody comprises a K_{D} of less than 13.5 nM. In some instances, the ACE2 antibody comprises a K_{D} of less than 15 nM. In some instances, the ACE2 antibody comprises a K_{D} of less than 20 nM. In some instances, the ACE2 antibody comprises a K_{D} of less than 25 nM. In some instances, the ACE2 antibody comprises a K_{D} of less than 30 nM.

[0086] In some embodiments, the systems and devices as described herein comprise one or more test lines. In some embodiments, the systems and devices comprise at least 1, 2, 3, 4, 5, 6, or more than 6 test lines. In some embodiments, the one or more test lines comprise the same antibody. In some embodiments, the one or more test lines comprise different antibodies. In some embodiments, the one or more test lines comprise one or more different antibodies. In some embodiments, the one or more test lines comprise at least 2, 3, 4, 5, 6, or more than 6 different antibodies.

[0087] The virus may be too small to be seen by the naked eye, or even with assisted vision such as with a light microscope. In some cases, a reagent comprising large particles (e.g. nanobeads, microbeads, colored dyes) is conjugated to the virus to develop a detectible signal. In some cases, the conjugate pad further comprises a conjugate reagent. The conjugate reagent may be used to detect an infectious agent by binding to a region of the target virus. In some cases, the conjugate reagent is coupled to a polypeptide that has affinity to a region of the target. In some cases, the polypeptide is a protein or an antibody as described herein. In some cases, the conjugate reagent provides a signal. The signal may then be detected by a device or in some cases the signal is visible such a color change or a visible band.

[0088] In some instances, the conjugate reagent is conjugated to an antibody. In some instances, the conjugate reagent is used for detecting the presence of the virus and generating a detectible signal. In some instances, the signal is a visible band, a fluorescent color, or a colored band. In some instances, the signal is detectible with assisted vision such as with a microscope.

[0089] The conjugate reagent can comprise various materials. In some instances, the conjugate reagent is selected from the group consisting of colloidal gold, latex particles, enzymes, colored dyes, paramagnetic particles, gold nanoparticles, gold nanoshells, and fluorescent particles. In some aspects, the conjugate reagent comprises gold nanoparticles, gold nanoshells, or combinations thereof.

[0090] Described herein are systems and devices for detecting a virus, wherein the device can be a lateral flow assay (LFA) device.

[0091] Devices as described herein can comprise varying dimensions. In some embodiments, the device is at least about 1 mm, 2 mm, 3 mm, 4 mm, 5 mm, 6 mm, 7 mm, 8 mm, 9 mm, 10 mm, 11 mm, 12 mm, 16 mm, 18 mm, 20 mm, or more than 20 mm by about 4 mm, 5 mm, 6 mm, 7 mm, 8 mm, 9 mm, 10 mm, 11 mm, 12 mm, 16 mm, 18 mm, 20 mm, 24 mm, 26 mm, 28 mm, 30 mm, 40 mm, 50 mm, 60 mm, 70 mm, 80 mm, 90 mm, 100 mm, or more than 100 mm. In some instances, the device is at least about 5 mm by about 70 mm. In some instances, the membrane substrate is at least about 4 mm, 5 mm, 6 mm, 7 mm, 8 mm, 9 mm, 10 mm, 11 mm, 12 mm, 16 mm, 18 mm, 20 mm, 24 mm, 26 mm, 28 mm, 30 mm, 40 mm, 50 mm, 60 mm, or more than 60 mm in width. the membrane substrate is at least about 4 mm, 5 mm, 6 mm, 7 mm, 8 mm, 9 mm, 10 mm, 11 mm, 12 mm, 16 mm, 18 mm, 20 mm, 24 mm, 26 mm, 28 mm, 30 mm, 40 mm, 50 mm, 60 mm, 70 mm, 80 mm, 90 mm, 100 mm, or more than 100 mm.

[0092] In some embodiments, the device further comprises a housing. In some instances, the housing covers at least a portion of the device. In some instances, the housing comprises a sample application port to allow sample application upstream from or to the test locations and an optic opening around the test locations to allow signal detection at the test locations. The housing can comprise any suitable material. For example, the housing can comprise a plastic material. In some instances, the housing comprises an opaque, translucent, or transparent material.

[0093] Systems and devices as described herein can detect the virus in a quick and reliable manner. In some instances, the device is a point of care device. In some instances, the device is a LFA device. In some instances, the device provides a read out in about 9 seconds (s) to about 30 minutes (min). In some instances, the device provides a read out in at least about 9 s, 10 s, 11 s, 12 s, 13 s, 14 s, 15 s, 20 s, 30 s, 40 s, 50 s, 1 min, 1.5 min, 2 min, 3 min, 4 min, 5 min, 10 min, 15 min, 20 min, 25 min, 30 min, or more. In some cases, the device provides a read out in at most about 30 min, 25 min, 20 min, 15 min, 10 min, 5 min, 4 min, 3 min, 2 min, 1.5 min, 1 min, 50 s, 40 s, 30 s, 20 s, 15 s, 14 s, 13 s, 12 s, 11 s, 10 s, 9 s, or less. In some aspects, the device provides a read out in at most about 20 seconds.

[0094] In some instances, a fragment of a virus is captured and detected. In some cases, a first portion of the fragment of the virus is detected by a first antibody and a second portion of the fragment of the virus is detected by a second antibody. In some instances, the fragment of the virus comprises a spike protein, a membrane protein, an envelope protein, a nucleocapsid protein, or combinations thereof

[0095] Methods of Use

[0096] Provided herein are methods of using the systems and devices as described herein for detecting or diagnosing a microbial infection. In some embodiments, the microbial infection is caused by a virus. In some embodiments, the microbial infection is caused by a bacteria. In some embodiments, the microbial infection is caused by a fungus. In some embodiments, the microbial infection is caused by a bacteria.

[0097] Described herein are methods for testing a sample to determine the presence of a virus in a sample. In some embodiments, the sample is a biological sample. In some instances, the biological sample is collected from a subject. In some instances, the sample is collected from a human subject or an animal subject. In some instances, the sample is a fluid (e.g., bodily fluid). In some instances, the fluid is saliva, blood, semen, vaginal fluid, or urine.

[0098] Provided herein are methods and systems to analyze a biological sample for the presence of a virus comprising improved sensitivity, specificity, reliability, and accuracy. In some instances, the virus is a respiratory virus. In some aspects, the virus is a coronavirus. In some instances, the coronavirus is SARS or MERS. In some aspects, the SARS coronavirus is COVID-19. In some instances, the virus is a human virus, a bovine virus, a swine virus, a feline virus, an avian virus, or an equine virus.

[0099] Methods and systems as described herein may have a sensitivity of at least about 70% of detecting the virus. In some instances, the methods and systems as described herein are at least about 75%, 80%, 85%. 90%, 95% or more than 95% sensitive in detecting the virus. In some instances, the methods and systems detect viral titers in a range of about 10³ to about 10⁴ viral particles. In some instances, the methods and systems detect viral titers of about 10¹, 10², 10³, 10⁴, 10⁵, 10⁶, 10⁷, 10⁸, 10⁹, or more than 10⁹ particles. In some instances, the methods and systems detect at least or about 0.25, 0.5, 1, 2.5, 5, 10, 15, 20, 25, 30, 40, 50, or more than 50 ng/mL of virus or viral protein. In some instances, the methods and systems detect at least or about 10 ng/mL of virus or viral protein. In some instances, the viral protein is SARS-CoV-2 spike trimer protein. In some instances, the viral protein is SARS-CoV-2 nucleocapsid protein.

[0100] Methods and systems as described herein may have a specificity of at least about 70% for detecting the virus as compared to another virus. In some instances, the methods and systems as described herein are at least about 75%, 80%, 85%. 90%, 95% or more than 95% specific for detecting the virus as compared to another virus. In some instances, the methods and systems as described herein are specific for detecting SARS-CoV-2. In some instances, the methods and systems as described herein distinguish between SARS-CoV, MERS-CoV, CoV-229E, HCoV-NL63, HCoV-OC43, or HCoV-HKU1. In some embodiments, some instances, the methods and systems as described herein distinguish SARS-CoV-2 from SARS-CoV.

[0101] Methods and systems as described herein may have an accuracy of at least about 70% of detecting the virus. In some instances, the methods and systems as described herein are at least about 75%, 80%, 85%. 90%, 95% or more than 95% accuracy in detecting the virus.

[0102] Methods and systems as described herein may have a reliability of at least about 70% of detecting the virus. In some instances, the methods and systems as described herein are at least about 75%, 80%, 85%. 90%, 95% or more than 95% reliable in detecting the virus.

[0103] Sensitivity, specificity, accuracy, and reliability may be improved as compared to a comparable test. In some instances, the test is a PCR-based test. In some instances, the test is RT-PCR, isothermal nucleic acid amplification, a CRISPR-based assay, rolling circle amplification, a nucleic acid hybridization assay (e.g., microarray), a sequencing assay, or immunoassay. In some instances, the immunoassay is an Enzyme-Linked Immunosorbent Assay (ELISA), lateral flow immunoassay, a neutralization assay, a luminescent immunoassay, a biosensor test, or a rapid antigen test.

[0104] Methods and systems as described herein may have an improved limit of detection. In some instances, the methods and systems as described herein has a limit of detection of at least about 10³ copies/mL. In some instances, the methods and systems detect viral titers of about 10¹, 10², 10³, 10⁴, 10⁵, 10⁶, 10⁷, 10⁸, 10⁹, or more than 10⁹ copies/mL.

[0105] In some instances, the testing methods are performed outside of a laboratory, in a patient's home, in a hospital. In some instances, the testing is performed in the laboratory. The methods can be applied in a handheld device such as a portable microfluidics device. In some aspects, the methods are applied in a portable hand-held device.

[0106] In some instances, the device provides a read out in about 1 minute to 30 minutes. In some instances, the device provides a read out in at least about 30 seconds, 40 seconds, 50 seconds, 1 minute, 1.5 minutes, 2 minutes, 3 minutes, 4 minutes, 5 minutes, 10 minutes, 15 minutes, 20 minutes, 25 minutes, 30 minutes, or more. In some cases, the device provides a read out in at most about 30 minutes, 25 minutes, 20 minutes, 15 minutes, 10 minutes, 5 minutes, 4 minutes, 3 minutes, 2 minutes, 1.5 minutes, 1 minutes, or less. In some aspects, the device provides a read out in a range of about 1 minute to about 30 minutes, about 2 minutes to about 25 minutes, about 5 minutes to about 20 minutes, or about 10 minutes to about 15 minutes.

[0107] Further described herein are examples of the steps that may be involved in detecting a virus in the systems and devices described herein. In some instances, a sample or fluid is loaded on the sample application pad. In some instances, a running buffer is applied to the sample application pad.

[0108] The sample fluid may migrate to the conjugate pad within a predefined period of time, via capillary action. The predefined period of time that it may take for the sample fluid to travel from the sample pad to the conjugate pad may be about 0.5 minutes (min) to 5 min. In some is the sample fluid travel time through the sample pad is at least 0.1 min, 0.2 min, 0.3 min, 0.4 min, 0.5 min, 1 min, 1.5 min, 2 min, 2.5 min, 3 min, 3.5 min, 4 min, 4.5 min, 5 min, or more. In some instances, the travel time is at most 5 min, 4.5 min, 4 min, 3.5 min, 3 min, 2.5 min, 2 min, 1.5 min, 1 min, 0.5 min, 0.4 min, 0.3 min, 0.2 min, 0.1 min, or less.

[0109] In some instances, the conjugate reagent on the conjugate pad and the sample fluid comes in contact at the conjugate pad. In some instances, the sample fluid rehydrates the conjugate reagents on the conjugate pad. In some instances, the sample fluid travels through (across) the conjugate pad for a predefined period of time. The predefined period of time for the fluid to travel across the conjugate pad to reach the membrane substrate may be about 0.5 minutes (min) to 5 min. In some instances, the fluid travel time through the conjugate pad is at least 0.1 min, 0.2 min, 0.3 min, 0.4 min, 0.5 min, 1 min, 1.5 min, 2 min, 2.5 min, 3 min, 3.5 min, 4 min, 4.5 min, 5 min, or more. In some instances, the fluid travel time across the conjugate pad is at most 5 min, 4.5 min, 4 min, 3.5 min, 3 min, 2.5 min, 2 min, 1.5 min, 1 min, 0.5 min, 0.4 min, 0.3 min, 0.2 min, 0.1 min, or less. If the sample contains the target for the conjugate reagent or the antibody coupled to the conjugate reagent at the conjugate pad, then the target-conjugate reagent complexes may be formed.

[0110] In some instances, the sample or fluid migrates through the membrane substrate towards the first test line. In some instances, the target-conjugate reagent complexes reach the first test line and are captured by immobilized antibodies described herein that are coupled to the first test line. In some aspects, the captured target-conjugate reagent complexes form a visible band at the first test line. In some instances, the fluid migrates across the first test line for a predefined period of time. The predefined period of time that it may take for the fluid to travel across the first test line may be about 0.5 minutes (min) to 5 min. In some instances, the fluid travel time across the first test line is at least 0.1 min, 0.2 min, 0.3 min, 0.4 min, 0.5 min, 1 min, 1.5 min, 2 min, 2.5 min, 3 min, 3.5 min, 4 min, 4.5 min, 5 min, or more. In some instances, the fluid travel time across the first test line is at most 5 min, 4.5 min, 4 min, 3.5 min, 3 min, 2.5 min, 2 min, 1.5 min, 1 min, 0.5 min, 0.4 min, 0.3 min, 0.2 min, 0.1 min, or less. In some instances, the fluid continues to migrate to the second test line.

[0111] In some instances, the sample or fluid migrates through the membrane substrate to a second test line. In some embodiments, the second test line is a control line. A visible readout may be included at the first test line, the second test line, or both. In some instances, the visible readout is a visible band, a fluorescent color, or a colored band. In some instances, the signal is a color change. In some aspects, based on the intensity or the color of the signal and/or detectible band indicates the presence, quantity, or potency of the virus. In some instances, the control line is compared to the first test line to determine presence, quantity, or potency of the virus (e.g., SARS-Cov-2).

[0112] Results from the device may then be transferred. In some instances, the results are transferred, wirelessly or through a cable, to a computerized device to process and display the information. In some embodiments, the result is transmitted to a software program on a computerized device, where the computerized device has a graphical user interface that displays the assay results.

[0113] In some instances, the results are transferred to a database. In some instances, the results from the database are used for bioinformatics applications such as functional genomics and homology searching.

[0114] Kits

[0115] Devices as described herein may be included in a kit. In some instances, kits are provided to an administering physician, other health care professional, a patient, or a caregiver. In some instances, a kit comprises a container which contains a testing device and instructions for using the device. In some instances, the container contains more than one testing device. The container may contain at least 1, 2, 3, 4, 5, 6, 7, 8, 9, 10, 11, 12, 20, 30, 40, 50, or more testing devices.

[0116] The assay kit can also include an amount of a chase buffer, e.g., PBS, sufficient to enable proper flow of the tracer reagent on each of the first and second test lines to the control line. The kit may comprise solutions, agents, and chase buffers that may be required to operate the device.

[0117] Additional kit components can include, e.g., an instrument for sample collection, e.g., a sharp instrument for drawing blood, or a swab for collecting saliva, urine, semen, or vaginal fluid, and an instrument for applying the sample to the sample pad, e.g., a dropper.

[0118] The kit can optionally also contain one or more other testing devices and diagnostic tools. The kit may also optionally contain therapeutic or other agents. In some cases, the kit comprises an assisted vision tool to help visually observe the readout such as a light source, a light filter, or a magnifier.

[0119] The assay kit can further include instructions for use, which can comprise a description of test pattern interpretation, and recommendations for patient action based on the result obtained. In embodiments, the patient is encouraged to seek a confirmatory test should the rapid test of the invention indicate early or intermediate virus infection. In embodiments, contact information for a suitable test facility is provided.

[0120] In some embodiments, the instructions for use include a cautionary warning based on the result interpretation. In embodiments, a mobile phone application is made available to the user, so that test results is provided to a practitioner and/or epidemiologist.

[0121] Highly Parallel Nucleic Acid Synthesis

[0122] Provided herein is a platform approach utilizing miniaturization, parallelization, and vertical integration of the end-to-end process from polynucleotide synthesis to gene assembly within nanowells on silicon to create a revolutionary synthesis platform. Devices described herein provide, with the same footprint as a 96-well plate, a silicon synthesis platform is capable of increasing throughput by a factor of up to 1,000 or more compared to traditional synthesis methods, with production of up to approximately 1,000,000 or more polynucleotides, or 10,000 or more genes in a single highly-parallelized run.

[0123] In some embodiments, a drug itself can be optimized using methods described herein. For example, to improve a specified function of an antibody, a variant polynucleotide library encoding for a portion of the antibody is designed and synthesized. A variant nucleic acid library for the antibody can then be generated by processes described herein (e.g., PCR mutagenesis followed by insertion into a vector). The antibody is then expressed in a production cell line and screened for enhanced activity. Example screens include examining modulation in binding affinity to an antigen, stability, or effector function (e.g., ADCC, complement, or apoptosis). Exemplary regions to optimize the antibody include, without limitation, the Fc region, Fab region, variable region of the Fab region, constant region of the Fab region, variable domain of the heavy chain or light chain (V_{H} or V_{L}), and specific complementarity-determining regions (CDRs) of V_{H} or V_{L}.

[0124] Substrates

[0125] Devices used as a surface for polynucleotide synthesis may be in the form of substrates which include, without limitation, homogenous array surfaces, patterned array surfaces, channels, beads, gels, and the like. Provided herein are substrates comprising a plurality of clusters, wherein each cluster comprises a plurality of loci that support the attachment and synthesis of polynucleotides. In some instances, substrates comprise a homogenous array surface. For example, the homogenous array surface is a homogenous plate. The term “locus” as used herein refers to a discrete region on a structure which provides support for polynucleotides encoding for a single predetermined sequence to extend from the surface. In some instances, a locus is on a two dimensional surface, e.g., a substantially planar surface. In some instances, a locus is on a three-dimensional surface, e.g., a well, microwell, channel, or post. In some instances, a surface of a locus comprises a material that is actively functionalized to attach to at least one nucleotide for polynucleotide synthesis, or preferably, a population of identical nucleotides for synthesis of a population of polynucleotides. In some instances, polynucleotide refers to a population of polynucleotides encoding for the same nucleic acid sequence. In some cases, a surface of a substrate is inclusive of one or a plurality of surfaces of a substrate. The average error rates for polynucleotides synthesized within a library described here using the systems and methods provided are often less than 1 in 1000, less than about 1 in 2000, less than about 1 in 3000 or less often without error correction.

[0126] Provided herein are surfaces that support the parallel synthesis of a plurality of polynucleotides having different predetermined sequences at addressable locations on a common support. In some instances, a substrate provides support for the synthesis of more than 50, 100, 200, 400, 600, 800, 1000, 1200, 1400, 1600, 1800, 2,000; 5,000; 10,000; 20,000; 50,000; 100,000; 200,000; 300,000; 400,000; 500,000; 600,000; 700,000; 800,000; 900,000; 1,000,000; 1,200,000; 1,400,000; 1,600,000; 1,800,000; 2,000,000; 2,500,000; 3,000,000; 3,500,000; 4,000,000; 4,500,000; 5,000,000; 10,000,000 or more non-identical polynucleotides. In some cases, the surfaces provide support for the synthesis of more than 50, 100, 200, 400, 600, 800, 1000, 1200, 1400, 1600, 1800, 2,000; 5,000; 10,000; 20,000; 50,000; 100,000; 200,000; 300,000; 400,000; 500,000; 600,000; 700,000; 800,000; 900,000; 1,000,000; 1,200,000; 1,400,000; 1,600,000; 1,800,000; 2,000,000; 2,500,000; 3,000,000; 3,500,000; 4,000,000; 4,500,000; 5,000,000; 10,000,000 or more polynucleotides encoding for distinct sequences. In some instances, at least a portion of the polynucleotides have an identical sequence or are configured to be synthesized with an identical sequence. In some instances, the substrate provides a surface environment for the growth of polynucleotides having at least 80, 90, 100, 120, 150, 175, 200, 225, 250, 275, 300, 325, 350, 375, 400, 425, 450, 475, 500 bases or more.

[0127] Provided herein are methods for polynucleotide synthesis on distinct loci of a substrate, wherein each locus supports the synthesis of a population of polynucleotides. In some cases, each locus supports the synthesis of a population of polynucleotides having a different sequence than a population of polynucleotides grown on another locus. In some instances, each polynucleotide sequence is synthesized with 1, 2, 3, 4, 5, 6, 7, 8, 9 or more redundancy across different loci within the same cluster of loci on a surface for polynucleotide synthesis. In some instances, the loci of a substrate are located within a plurality of clusters. In some instances, a substrate comprises at least 10, 500, 1000, 2000, 3000, 4000, 5000, 6000, 7000, 8000, 9000, 10000, 11000, 12000, 13000, 14000, 15000, 20000, 30000, 40000, 50000 or more clusters. In some instances, a substrate comprises more than 2,000; 5,000; 10,000; 100,000; 200,000; 300,000; 400,000; 500,000; 600,000; 700,000; 800,000; 900,000; 1,000,000; 1,100,000; 1,200,000; 1,300,000; 1,400,000; 1,500,000; 1,600,000; 1,700,000; 1,800,000; 1,900,000; 2,000,000; 300,000; 400,000; 500,000; 600,000; 700,000; 800,000; 900,000; 1,000,000; 1,200,000; 1,400,000; 1,600,000; 1,800,000; 2,000,000; 2,500,000; 3,000,000; 3,500,000; 4,000,000; 4,500,000; 5,000,000; or 10,000,000 or more distinct loci. In some instances, a substrate comprises about 10,000 distinct loci. The amount of loci within a single cluster is varied in different instances. In some cases, each cluster includes 1, 2, 3, 4, 5, 6, 7, 8, 9, 10, 20, 30, 40, 50, 60, 70, 80, 90, 100, 120, 130, 150, 200, 300, 400, 500 or more loci. In some instances, each cluster includes about 50-500 loci. In some instances, each cluster includes about 100-200 loci. In some instances, each cluster includes about 100-150 loci. In some instances, each cluster includes about 109, 121, 130 or 137 loci. In some instances, each cluster includes about 19, 20, 61, 64 or more loci. Alternatively or in combination, polynucleotide synthesis occurs on a homogenous array surface.

[0128] In some instances, the number of distinct polynucleotides synthesized on a substrate is dependent on the number of distinct loci available in the substrate. In some instances, the density of loci within a cluster or surface of a substrate is at least or about 1, 10, 25, 50, 65, 75, 100, 130, 150, 175, 200, 300, 400, 500, 1,000 or more loci per mm². In some cases, a substrate comprises 10-500, 25-400, 50-500, 100-500, 150-500, 10-250, 50-250, 10-200, or 50-200 mm². In some instances, the distance between the centers of two adjacent loci within a cluster or surface is from about 10-500, from about 10-200, or from about 10-100 um. In some instances, the distance between two centers of adjacent loci is greater than about 10, 20, 30, 40, 50, 60, 70, 80, 90 or 100 um. In some instances, the distance between the centers of two adjacent loci is less than about 200, 150, 100, 80, 70, 60, 50, 40, 30, 20 or 10 um. In some instances, each locus has a width of about 0.5, 1, 2, 3, 4, 5, 6, 7, 8, 9, 10, 20, 30, 40, 50, 60, 70, 80, 90 or 100 um. In some cases, each locus has a width of about 0.5-100, 0.5-50, 10-75, or 0.5-50 um.

[0129] In some instances, the density of clusters within a substrate is at least or about 1 cluster per 100 mm², 1 cluster per 10 mm², 1 cluster per 5 mm², 1 cluster per 4 mm², 1 cluster per 3 mm², 1 cluster per 2 mm², 1 cluster per 1 mm², 2 clusters per 1 mm², 3 clusters per 1 mm², 4 clusters per 1 mm², 5 clusters per 1 mm², 10 clusters per 1 mm², 50 clusters per 1 mm² or more. In some instances, a substrate comprises from about 1 cluster per 10 mm² to about 10 clusters per 1 mm². In some instances, the distance between the centers of two adjacent clusters is at least or about 50, 100, 200, 500, 1000, 2000, or 5000 um. In some cases, the distance between the centers of two adjacent clusters is between about 50-100, 50-200, 50-300, 50-500, and 100-2000 um. In some cases, the distance between the centers of two adjacent clusters is between about 0.05-50, 0.05-10, 0.05-5, 0.05-4, 0.05-3, 0.05-2, 0.1-10, 0.2-10, 0.3-10, 0.4-10, 0.5-10, 0.5-5, or 0.5-2 mm. In some cases, each cluster has a cross section of about 0.5 to about 2, about 0.5 to about 1, or about 1 to about 2 mm. In some cases, each cluster has a cross section of about 0.5, 0.6, 0.7, 0.8, 0.9, 1, 1.1, 1.2, 1.3, 1.4, 1.5, 1.6, 1.7, 1.8, 1.9 or 2 mm. In some cases, each cluster has an interior cross section of about 0.5, 0.6, 0.7, 0.8, 0.9, 1, 1.1, 1.15, 1.2, 1.3, 1.4, 1.5, 1.6, 1.7, 1.8, 1.9 or 2 mm.

[0130] In some instances, a substrate is about the size of a standard 96 well plate, for example between about 100 and about 200 mm by between about 50 and about 150 mm. In some instances, a substrate has a diameter less than or equal to about 1000, 500, 450, 400, 300, 250, 200, 150, 100 or 50 mm. In some instances, the diameter of a substrate is between about 25-1000, 25-800, 25-600, 25-500, 25-400, 25-300, or 25-200 mm. In some instances, a substrate has a planar surface area of at least about 100; 200; 500; 1,000; 2,000; 5,000; 10,000; 12,000; 15,000; 20,000; 30,000; 40,000; 50,000 mm² or more. In some instances, the thickness of a substrate is between about 50-2000, 50-1000, 100-1000, 200-1000, or 250-1000 mm.

[0131] Surface Materials

[0132] Substrates, devices, and reactors provided herein are fabricated from any variety of materials suitable for the methods, compositions, and systems described herein. In certain instances, substrate materials are fabricated to exhibit a low level of nucleotide binding. In some instances, substrate materials are modified to generate distinct surfaces that exhibit a high level of nucleotide binding. In some instances, substrate materials are transparent to visible and/or UV light. In some instances, substrate materials are sufficiently conductive, e.g., are able to form uniform electric fields across all or a portion of a substrate. In some instances, conductive materials are connected to an electric ground. In some instances, the substrate is heat conductive or insulated. In some instances, the materials are chemical resistant and heat resistant to support chemical or biochemical reactions, for example polynucleotide synthesis reaction processes. In some instances, a substrate comprises flexible materials. For flexible materials, materials can include, without limitation: nylon, both modified and unmodified, nitrocellulose, polypropylene, and the like. In some instances, a substrate comprises rigid materials. For rigid materials, materials can include, without limitation: glass; fuse silica; silicon, plastics (for example polytetrafluoroethylene, polypropylene, polystyrene, polycarbonate, and blends thereof, and the like); metals (for example, gold, platinum, and the like). The substrate, solid support or reactors can be fabricated from a material selected from the group consisting of silicon, polystyrene, agarose, dextran, cellulosic polymers, polyacrylamides, polydimethylsiloxane (PDMS), and glass. The substrates/solid supports or the microstructures, reactors therein may be manufactured with a combination of materials listed herein or any other suitable material known in the art.

[0133] Surface Architecture

[0134] Provided herein are substrates for the methods, compositions, and systems described herein, wherein the substrates have a surface architecture suitable for the methods, compositions, and systems described herein. In some instances, a substrate comprises raised and/or lowered features. One benefit of having such features is an increase in surface area to support polynucleotide synthesis. In some instances, a substrate having raised and/or lowered features is referred to as a three-dimensional substrate. In some cases, a three-dimensional substrate comprises one or more channels. In some cases, one or more loci comprise a channel. In some cases, the channels are accessible to reagent deposition via a deposition device such as a material deposition device. In some cases, reagents and/or fluids collect in a larger well in fluid communication one or more channels. For example, a substrate comprises a plurality of channels corresponding to a plurality of loci with a cluster, and the plurality of channels are in fluid communication with one well of the cluster. In some methods, a library of polynucleotides is synthesized in a plurality of loci of a cluster.

[0135] Provided herein are substrates for the methods, compositions, and systems described herein, wherein the substrates are configured for polynucleotide synthesis. In some instances, the structure is configured to allow for controlled flow and mass transfer paths for polynucleotide synthesis on a surface. In some instances, the configuration of a substrate allows for the controlled and even distribution of mass transfer paths, chemical exposure times, and/or wash efficacy during polynucleotide synthesis. In some instances, the configuration of a substrate allows for increased sweep efficiency, for example by providing sufficient volume for a growing polynucleotide such that the excluded volume by the growing polynucleotide does not take up more than 50, 45, 40, 35, 30, 25, 20, 15, 14, 13, 12, 11, 10, 9, 8, 7, 6, 5, 4, 3, 2, 1%, or less of the initially available volume that is available or suitable for growing the polynucleotide. In some instances, a three-dimensional structure allows for managed flow of fluid to allow for the rapid exchange of chemical exposure.

[0136] Provided herein are substrates for the methods, compositions, and systems described herein, wherein the substrates comprise structures suitable for the methods, compositions, and systems described herein. In some instances, segregation is achieved by physical structure. In some instances, segregation is achieved by differential functionalization of the surface generating active and passive regions for polynucleotide synthesis. In some instances, differential functionalization is achieved by alternating the hydrophobicity across the substrate surface, thereby creating water contact angle effects that cause beading or wetting of the deposited reagents.

[0137] Employing larger structures can decrease splashing and cross-contamination of distinct polynucleotide synthesis locations with reagents of the neighboring spots. In some cases, a device, such as a material deposition device, is used to deposit reagents to distinct polynucleotide synthesis locations. Substrates having three-dimensional features are configured in a manner that allows for the synthesis of a large number of polynucleotides (e.g., more than about 10,000) with a low error rate (e.g., less than about 1:500, 1:1000, 1:1500, 1:2,000, 1:3,000, 1:5,000, or 1:10,000). In some cases, a substrate comprises features with a density of about or greater than about 1, 5, 10, 20, 30, 40, 50, 60, 70, 80, 100, 110, 120, 130, 140, 150, 160, 170, 180, 190, 200, 300, 400 or 500 features per mm².

[0138] A well of a substrate may have the same or different width, height, and/or volume as another well of the substrate. A channel of a substrate may have the same or different width, height, and/or volume as another channel of the substrate. In some instances, the diameter of a cluster or the diameter of a well comprising a cluster, or both, is between about 0.05-50, 0.05-10, 0.05-5, 0.05-4, 0.05-3, 0.05-2, 0.05-1, 0.05-0.5, 0.05-0.1, 0.1-10, 0.2-10, 0.3-10, 0.4-10, 0.5-10, 0.5-5, or 0.5-2 mm. In some instances, the diameter of a cluster or well or both is less than or about 5, 4, 3, 2, 1, 0.5, 0.1, 0.09, 0.08, 0.07, 0.06, or 0.05 mm. In some instances, the diameter of a cluster or well or both is between about 1.0 and 1.3 mm. In some instances, the diameter of a cluster or well, or both is about 1.150 mm. In some instances, the diameter of a cluster or well, or both is about 0.08 mm. The diameter of a cluster refers to clusters within a two-dimensional or three-dimensional substrate.

[0139] In some instances, the height of a well is from about 20-1000, 50-1000, 100-1000, 200-1000, 300-1000, 400-1000, or 500-1000 um. In some cases, the height of a well is less than about 1000, 900, 800, 700, or 600 um.

[0140] In some instances, a substrate comprises a plurality of channels corresponding to a plurality of loci within a cluster, wherein the height or depth of a channel is 5-500, 5-400, 5-300, 5-200, 5-100, 5-50, or 10-50 um. In some cases, the height of a channel is less than 100, 80, 60, 40, or 20 um.

[0141] In some instances, the diameter of a channel, locus (e.g., in a substantially planar substrate) or both channel and locus (e.g., in a three-dimensional substrate wherein a locus corresponds to a channel) is from about 1-1000, 1-500, 1-200, 1-100, 5-100, or 10-100 um, for example, about 90, 80, 70, 60, 50, 40, 30, 20 or 10 um. In some instances, the diameter of a channel, locus, or both channel and locus is less than about 100, 90, 80, 70, 60, 50, 40, 30, 20 or 10 um. In some instances, the distance between the center of two adjacent channels, loci, or channels and loci is from about 1-500, 1-200, 1-100, 5-200, 5-100, 5-50, or 5-30, for example, about 20 um.

[0142] Surface Modifications

[0143] Provided herein are methods for polynucleotide synthesis on a surface, wherein the surface comprises various surface modifications. In some instances, the surface modifications are employed for the chemical and/or physical alteration of a surface by an additive or subtractive process to change one or more chemical and/or physical properties of a substrate surface or a selected site or region of a substrate surface. For example, surface modifications include, without limitation, (1) changing the wetting properties of a surface, (2) functionalizing a surface, i.e., providing, modifying or substituting surface functional groups, (3) defunctionalizing a surface, i.e., removing surface functional groups, (4) otherwise altering the chemical composition of a surface, e.g., through etching, (5) increasing or decreasing surface roughness, (6) providing a coating on a surface, e.g., a coating that exhibits wetting properties that are different from the wetting properties of the surface, and/or (7) depositing particulates on a surface.

[0144] In some cases, the addition of a chemical layer on top of a surface (referred to as adhesion promoter) facilitates structured patterning of loci on a surface of a substrate. Exemplary surfaces for application of adhesion promotion include, without limitation, glass, silicon, silicon dioxide and silicon nitride. In some cases, the adhesion promoter is a chemical with a high surface energy. In some instances, a second chemical layer is deposited on a surface of a substrate. In some cases, the second chemical layer has a low surface energy. In some cases, surface energy of a chemical layer coated on a surface supports localization of droplets on the surface. Depending on the patterning arrangement selected, the proximity of loci and/or area of fluid contact at the loci are alterable.

[0145] In some instances, a substrate surface, or resolved loci, onto which nucleic acids or other moieties are deposited, e.g., for polynucleotide synthesis, are smooth or substantially planar (e.g., two-dimensional) or have irregularities, such as raised or lowered features (e.g., three-dimensional features). In some instances, a substrate surface is modified with one or more different layers of compounds. Such modification layers of interest include, without limitation, inorganic and organic layers such as metals, metal oxides, polymers, small organic molecules and the like.

[0146] In some instances, resolved loci of a substrate are functionalized with one or more moieties that increase and/or decrease surface energy. In some cases, a moiety is chemically inert. In some cases, a moiety is configured to support a desired chemical reaction, for example, one or more processes in a polynucleotide synthesis reaction. The surface energy, or hydrophobicity, of a surface is a factor for determining the affinity of a nucleotide to attach onto the surface. In some instances, a method for substrate functionalization comprises: (a) providing a substrate having a surface that comprises silicon dioxide; and (b) silanizing the surface using, a suitable silanizing agent described herein or otherwise known in the art, for example, an organofunctional alkoxysilane molecule. Methods and functionalizing agents are described in U.S. Pat. No. 5,474,796, which is herein incorporated by reference in its entirety.

[0147] In some instances, a substrate surface is functionalized by contact with a derivatizing composition that contains a mixture of silanes, under reaction conditions effective to couple the silanes to the substrate surface, typically via reactive hydrophilic moieties present on the substrate surface. Silanization generally covers a surface through self-assembly with organofunctional alkoxysilane molecules. A variety of siloxane functionalizing reagents can further be used as currently known in the art, e.g., for lowering or increasing surface energy. The organofunctional alkoxysilanes are classified according to their organic functions.

[0148] Polynucleotide Synthesis

[0149] Methods of the current disclosure for polynucleotide synthesis may include processes involving phosphoramidite chemistry. In some instances, polynucleotide synthesis comprises coupling a base with phosphoramidite. Polynucleotide synthesis may comprise coupling a base by deposition of phosphoramidite under coupling conditions, wherein the same base is optionally deposited with phosphoramidite more than once, i.e., double coupling. Polynucleotide synthesis may comprise capping of unreacted sites. In some instances, capping is optional. Polynucleotide synthesis may also comprise oxidation or an oxidation step or oxidation steps. Polynucleotide synthesis may comprise deblocking, detritylation, and sulfurization. In some instances, polynucleotide synthesis comprises either oxidation or sulfurization. In some instances, between one or each step during a polynucleotide synthesis reaction, the device is washed, for example, using tetrazole or acetonitrile. Time frames for any one step in a phosphoramidite synthesis method may be less than about 2 min, 1 min, 50 sec, 40 sec, 30 sec, 20 sec and 10 sec.

[0150] Polynucleotide synthesis using a phosphoramidite method may comprise a subsequent addition of a phosphoramidite building block (e.g., nucleoside phosphoramidite) to a growing polynucleotide chain for the formation of a phosphite triester linkage. Phosphoramidite polynucleotide synthesis proceeds in the 3′ to 5′ direction. Phosphoramidite polynucleotide synthesis allows for the controlled addition of one nucleotide to a growing nucleic acid chain per synthesis cycle. In some instances, each synthesis cycle comprises a coupling step. Phosphoramidite coupling involves the formation of a phosphite triester linkage between an activated nucleoside phosphoramidite and a nucleoside bound to the substrate, for example, via a linker. In some instances, the nucleoside phosphoramidite is provided to the device activated. In some instances, the nucleoside phosphoramidite is provided to the device with an activator. In some instances, nucleoside phosphoramidites are provided to the device in a 1.5, 2, 3, 4, 5, 6, 7, 8, 9, 10, 11, 12, 13, 14, 15, 16, 17, 18, 19, 20, 25, 30, 35, 40, 50, 60, 70, 80, 90, 100-fold excess or more over the substrate-bound nucleosides. In some instances, the addition of nucleoside phosphoramidite is performed in an anhydrous environment, for example, in anhydrous acetonitrile. Following addition of a nucleoside phosphoramidite, the device is optionally washed. In some instances, the coupling step is repeated one or more additional times, optionally with a wash step between nucleoside phosphoramidite additions to the substrate. In some instances, a polynucleotide synthesis method used herein comprises 1, 2, 3 or more sequential coupling steps. Prior to coupling, in many cases, the nucleoside bound to the device is de-protected by removal of a protecting group, where the protecting group functions to prevent polymerization. A common protecting group is 4,4′-dimethoxytrityl (DMT).

[0151] Following coupling, phosphoramidite polynucleotide synthesis methods optionally comprise a capping step. In a capping step, the growing polynucleotide is treated with a capping agent. A capping step is useful to block unreacted substrate-bound 5′-OH groups after coupling from further chain elongation, preventing the formation of polynucleotides with internal base deletions. Further, phosphoramidites activated with 1H-tetrazole may react, to a small extent, with the O6 position of guanosine. Without being bound by theory, upon oxidation with I₂/water, this side product, possibly via O6-N7 migration, may undergo depurination. The apurinic sites may end up being cleaved in the course of the final deprotection of the polynucleotide thus reducing the yield of the full-length product. The O6 modifications may be removed by treatment with the capping reagent prior to oxidation with I₂/water. In some instances, inclusion of a capping step during polynucleotide synthesis decreases the error rate as compared to synthesis without capping. As an example, the capping step comprises treating the substrate-bound polynucleotide with a mixture of acetic anhydride and 1-methylimidazole. Following a capping step, the device is optionally washed.

[0152] In some instances, following addition of a nucleoside phosphoramidite, and optionally after capping and one or more wash steps, the device bound growing nucleic acid is oxidized. The oxidation step comprises the phosphite triester is oxidized into a tetracoordinated phosphate triester, a protected precursor of the naturally occurring phosphate diester internucleoside linkage. In some instances, oxidation of the growing polynucleotide is achieved by treatment with iodine and water, optionally in the presence of a weak base (e.g., pyridine, lutidine, collidine). Oxidation may be carried out under anhydrous conditions using, e.g. tert-Butyl hydroperoxide or (1S)-(+)-(10-camphorsulfonyl)-oxaziridine (CSO). In some methods, a capping step is performed following oxidation. A second capping step allows for device drying, as residual water from oxidation that may persist can inhibit subsequent coupling. Following oxidation, the device and growing polynucleotide is optionally washed. In some instances, the step of oxidation is substituted with a sulfurization step to obtain polynucleotide phosphorothioates, wherein any capping steps can be performed after the sulfurization. Many reagents are capable of the efficient sulfur transfer, including but not limited to 3-(Dimethylaminomethylidene)amino)-3H-1,2,4-dithiazole-3-thione, DDTT, 3H-1,2-benzodithiol-3-one 1,1-dioxide, also known as Beaucage reagent, and N,N,N′N′-Tetraethylthiuram disulfide (TETD).

[0153] In order for a subsequent cycle of nucleoside incorporation to occur through coupling, the protected 5′ end of the device bound growing polynucleotide is removed so that the primary hydroxyl group is reactive with a next nucleoside phosphoramidite. In some instances, the protecting group is DMT and deblocking occurs with trichloroacetic acid in dichloromethane. Conducting detritylation for an extended time or with stronger than recommended solutions of acids may lead to increased depurination of solid support-bound polynucleotide and thus reduces the yield of the desired full-length product. Methods and compositions of the disclosure described herein provide for controlled deblocking conditions limiting undesired depurination reactions. In some instances, the device bound polynucleotide is washed after deblocking. In some instances, efficient washing after deblocking contributes to synthesized polynucleotides having a low error rate.

[0154] Methods for the synthesis of polynucleotides typically involve an iterating sequence of the following steps: application of a protected monomer to an actively functionalized surface (e.g., locus) to link with either the activated surface, a linker or with a previously deprotected monomer; deprotection of the applied monomer so that it is reactive with a subsequently applied protected monomer; and application of another protected monomer for linking. One or more intermediate steps include oxidation or sulfurization. In some instances, one or more wash steps precede or follow one or all of the steps.

[0155] Methods for phosphoramidite-based polynucleotide synthesis comprise a series of chemical steps. In some instances, one or more steps of a synthesis method involve reagent cycling, where one or more steps of the method comprise application to the device of a reagent useful for the step. For example, reagents are cycled by a series of liquid deposition and vacuum drying steps. For substrates comprising three-dimensional features such as wells, microwells, channels and the like, reagents are optionally passed through one or more regions of the device via the wells and/or channels.

[0156] Methods and systems described herein relate to polynucleotide synthesis devices for the synthesis of polynucleotides. The synthesis may be in parallel. For example, at least or about at least 2, 3, 4, 5, 6, 7, 8, 9, 10, 11, 12, 13, 14, 15, 16, 17, 18, 19, 20, 21, 22, 23, 24, 25, 30, 35, 40, 45, 50, 100, 150, 200, 250, 300, 350, 400, 450, 500, 550, 600, 650, 700, 750, 800, 850, 900, 1000, 10000, 50000, 75000, 100000 or more polynucleotides can be synthesized in parallel. The total number polynucleotides that may be synthesized in parallel may be from 2-100000, 3-50000, 4-10000, 5-1000, 6-900, 7-850, 8-800, 9-750, 10-700, 11-650, 12-600, 13-550, 14-500, 15-450, 16-400, 17-350, 18-300, 19-250, 20-200, 21-150, 22-100, 23-50, 24-45, 25-40, 30-35. Those of skill in the art appreciate that the total number of polynucleotides synthesized in parallel may fall within any range bound by any of these values, for example 25-100. The total number of polynucleotides synthesized in parallel may fall within any range defined by any of the values serving as endpoints of the range. Total molar mass of polynucleotides synthesized within the device or the molar mass of each of the polynucleotides may be at least or at least about 10, 20, 30, 40, 50, 100, 250, 500, 750, 1000, 2000, 3000, 4000, 5000, 6000, 7000, 8000, 9000, 10000, 25000, 50000, 75000, 100000 picomoles, or more. The length of each of the polynucleotides or average length of the polynucleotides within the device may be at least or about at least 10, 15, 20, 25, 30, 35, 40, 45, 50, 100, 150, 200, 300, 400, 500 nucleotides, or more. The length of each of the polynucleotides or average length of the polynucleotides within the device may be at most or about at most 500, 400, 300, 200, 150, 100, 50, 45, 35, 30, 25, 20, 19, 18, 17, 16, 15, 14, 13, 12, 11, 10 nucleotides, or less. The length of each of the polynucleotides or average length of the polynucleotides within the device may fall from 10-500, 9-400, 11-300, 12-200, 13-150, 14-100, 15-50, 16-45, 17-40, 18-35, 19-25. Those of skill in the art appreciate that the length of each of the polynucleotides or average length of the polynucleotides within the device may fall within any range bound by any of these values, for example 100-300. The length of each of the polynucleotides or average length of the polynucleotides within the device may fall within any range defined by any of the values serving as endpoints of the range.

[0157] Methods for polynucleotide synthesis on a surface provided herein allow for synthesis at a fast rate. As an example, at least 3, 4, 5, 6, 7, 8, 9, 10, 11, 12, 13, 14, 15, 16, 17, 18, 19, 20, 21, 22, 23, 24, 25, 26, 27, 28, 29, 30, 35, 40, 45, 50, 55, 60, 70, 80, 90, 100, 125, 150, 175, 200 nucleotides per hour, or more are synthesized. Nucleotides include adenine, guanine, thymine, cytosine, uridine building blocks, or analogs/modified versions thereof. In some instances, libraries of polynucleotides are synthesized in parallel on substrate. For example, a device comprising about or at least about 100; 1,000; 10,000; 30,000; 75,000; 100,000; 1,000,000; 2,000,000; 3,000,000; 4,000,000; or 5,000,000 resolved loci is able to support the synthesis of at least the same number of distinct polynucleotides, wherein polynucleotide encoding a distinct sequence is synthesized on a resolved locus. In some instances, a library of polynucleotides is synthesized on a device with low error rates described herein in less than about three months, two months, one month, three weeks, 15, 14, 13, 12, 11, 10, 9, 8, 7, 6, 5, 4, 3, 2 days, 24 hours or less. In some instances, larger nucleic acids assembled from a polynucleotide library synthesized with low error rate using the substrates and methods described herein are prepared in less than about three months, two months, one month, three weeks, 15, 14, 13, 12, 11, 10, 9, 8, 7, 6, 5, 4, 3, 2 days, 24 hours or less.

[0158] In some instances, methods described herein provide for generation of a library of nucleic acids comprising variant nucleic acids differing at a plurality of codon sites. In some instances, a nucleic acid may have 1 site, 2 sites, 3 sites, 4 sites, 5 sites, 6 sites, 7 sites, 8 sites, 9 sites, 10 sites, 11 sites, 12 sites, 13 sites, 14 sites, 15 sites, 16 sites, 17 sites 18 sites, 19 sites, 20 sites, 30 sites, 40 sites, 50 sites, or more of variant codon sites.

[0159] In some instances, the one or more sites of variant codon sites may be adjacent. In some instances, the one or more sites of variant codon sites may not be adjacent and separated by 1, 2, 3, 4, 5, 6, 7, 8, 9, 10, or more codons.

[0160] In some instances, a nucleic acid may comprise multiple sites of variant codon sites, wherein all the variant codon sites are adjacent to one another, forming a stretch of variant codon sites. In some instances, a nucleic acid may comprise multiple sites of variant codon sites, wherein none the variant codon sites are adjacent to one another. In some instances, a nucleic acid may comprise multiple sites of variant codon sites, wherein some the variant codon sites are adjacent to one another, forming a stretch of variant codon sites, and some of the variant codon sites are not adjacent to one another.

[0161] Referring to the Figures, FIG. 2 illustrates an exemplary process workflow for synthesis of nucleic acids (e.g., genes) from shorter nucleic acids. The workflow is divided generally into phases: (1) de novo synthesis of a single stranded nucleic acid library, (2) joining nucleic acids to form larger fragments, (3) error correction, (4) quality control, and (5) shipment. Prior to de novo synthesis, an intended nucleic acid sequence or group of nucleic acid sequences is preselected. For example, a group of genes is preselected for generation.

[0162] Once large nucleic acids for generation are selected, a predetermined library of nucleic acids is designed for de novo synthesis. Various suitable methods are known for generating high density polynucleotide arrays. In the workflow example, a device surface layer is provided. In the example, chemistry of the surface is altered in order to improve the polynucleotide synthesis process. Areas of low surface energy are generated to repel liquid while areas of high surface energy are generated to attract liquids. The surface itself may be in the form of a planar surface or contain variations in shape, such as protrusions or microwells which increase surface area. In the workflow example, high surface energy molecules selected serve a dual function of supporting DNA chemistry, as disclosed in International Patent Application Publication WO/2015/021080, which is herein incorporated by reference in its entirety.

[0163] In situ preparation of polynucleotide arrays is generated on a solid support and utilizes single nucleotide extension process to extend multiple oligomers in parallel. A deposition device, such as a material deposition device 201, is designed to release reagents in a step wise fashion such that multiple polynucleotides extend, in parallel, one residue at a time to generate oligomers with a predetermined nucleic acid sequence 202. In some instances, polynucleotides are cleaved from the surface at this stage. Cleavage includes gas cleavage, e.g., with ammonia or methylamine.

[0164] The generated polynucleotide libraries are placed in a reaction chamber. In this exemplary workflow, the reaction chamber (also referred to as “nanoreactor”) is a silicon coated well, containing PCR reagents and lowered onto the polynucleotide library 203. Prior to or after the sealing 204 of the polynucleotides, a reagent is added to release the polynucleotides from the substrate. In the exemplary workflow, the polynucleotides are released subsequent to sealing of the nanoreactor 205. Once released, fragments of single stranded polynucleotides hybridize in order to span an entire long range sequence of DNA. Partial hybridization 205 is possible because each synthesized polynucleotide is designed to have a small portion overlapping with at least one other polynucleotide in the pool.

[0165] After hybridization, a PCA reaction is commenced. During the polymerase cycles, the polynucleotides anneal to complementary fragments and gaps are filled in by a polymerase. Each cycle increases the length of various fragments randomly depending on which polynucleotides find each other. Complementarity amongst the fragments allows for forming a complete large span of double stranded DNA 206.

[0166] After PCA is complete, the nanoreactor is separated from the device 207 and positioned for interaction with a device having primers for PCR 208. After sealing, the nanoreactor is subject to PCR 209 and the larger nucleic acids are amplified. After PCR 210, the nanochamber is opened 211, error correction reagents are added 212, the chamber is sealed 213 and an error correction reaction occurs to remove mismatched base pairs and/or strands with poor complementarity from the double stranded PCR amplification products 214. The nanoreactor is opened and separated 215. Error corrected product is next subject to additional processing steps, such as PCR and molecular bar coding, and then packaged 222 for shipment 223.

[0167] In some instances, quality control measures are taken. After error correction, quality control steps include for example interaction with a wafer having sequencing primers for amplification of the error corrected product 216, sealing the wafer to a chamber containing error corrected amplification product 217, and performing an additional round of amplification 218. The nanoreactor is opened 219 and the products are pooled 220 and sequenced 221. After an acceptable quality control determination is made, the packaged product 222 is approved for shipment 223.

[0168] In some instances, a nucleic acid generate by a workflow such as that in FIG. 2 is subject to mutagenesis using overlapping primers disclosed herein. In some instances, a library of primers are generated by in situ preparation on a solid support and utilize single nucleotide extension process to extend multiple oligomers in parallel. A deposition device, such as a material deposition device, is designed to release reagents in a step wise fashion such that multiple polynucleotides extend, in parallel, one residue at a time to generate oligomers with a predetermined nucleic acid sequence 202.

[0169] Computer Systems

[0170] Any of the systems described herein, may be operably linked to a computer and may be automated through a computer either locally or remotely. In various instances, the methods and systems of the disclosure may further comprise software programs on computer systems and use thereof. Accordingly, computerized control for the synchronization of the dispense/vacuum/refill functions such as orchestrating and synchronizing the material deposition device movement, dispense action and vacuum actuation are within the bounds of the disclosure. The computer systems may be programmed to interface between the user specified base sequence and the position of a material deposition device to deliver the correct reagents to specified regions of the substrate.

[0171] The computer system 300 illustrated in FIG. 3 may be understood as a logical apparatus that can read instructions from media 311 and/or a network port 305, which can optionally be connected to server 309 having fixed media 312. The system, such as shown in FIG. 3 can include a CPU 301, disk drives 303, optional input devices such as keyboard 315 and/or mouse 316 and optional monitor 307. Data communication can be achieved through the indicated communication medium to a server at a local or a remote location. The communication medium can include any means of transmitting and/or receiving data. For example, the communication medium can be a network connection, a wireless connection or an internet connection. Such a connection can provide for communication over the World Wide Web. It is envisioned that data relating to the present disclosure can be transmitted over such networks or connections for reception and/or review by a party 322 as illustrated in FIG. 3.

[0172] FIG. 4 is a block diagram illustrating a first example architecture of a computer system 400 that can be used in connection with example instances of the present disclosure. As depicted in FIG. 4, the example computer system can include a processor 402 for processing instructions. Non-limiting examples of processors include: Intel Xeon™ processor, AMD Opteron™ processor, Samsung 32-bit RISC ARM 1176JZ(F)-S v1.0™ processor, ARM Cortex-A8 Samsung S5PC100™ processor, ARM Cortex-A8 Apple A4™ processor, Marvell PXA 930™ processor, or a functionally-equivalent processor. Multiple threads of execution can be used for parallel processing. In some instances, multiple processors or processors with multiple cores can also be used, whether in a single computer system, in a cluster, or distributed across systems over a network comprising a plurality of computers, cell phones, and/or personal data assistant devices.

[0173] As illustrated in FIG. 4, a high speed cache 404 can be connected to, or incorporated in, the processor 402 to provide a high speed memory for instructions or data that have been recently, or are frequently, used by processor 402. The processor 402 is connected to a north bridge 406 by a processor bus 408. The north bridge 406 is connected to random access memory (RAM) 410 by a memory bus 412 and manages access to the RAM 410 by the processor 402. The north bridge 406 is also connected to a south bridge 414 by a chipset bus 416. The south bridge 414 is, in turn, connected to a peripheral bus 418. The peripheral bus can be, for example, PCI, PCI-X, PCI Express, or other peripheral bus. The north bridge and south bridge are often referred to as a processor chipset and manage data transfer between the processor, RAM, and peripheral components on the peripheral bus 418. In some alternative architectures, the functionality of the north bridge can be incorporated into the processor instead of using a separate north bridge chip. In some instances, system 400 can include an accelerator card 422 attached to the peripheral bus 418. The accelerator can include field programmable gate arrays (FPGAs) or other hardware for accelerating certain processing. For example, an accelerator can be used for adaptive data restructuring or to evaluate algebraic expressions used in extended set processing.

[0174] Software and data are stored in external storage 424 and can be loaded into RAM 410 and/or cache 404 for use by the processor. The system 400 includes an operating system for managing system resources; non-limiting examples of operating systems include: Linux, Windows™, MACOS™, BlackBerry OS™, iOS™, and other functionally-equivalent operating systems, as well as application software running on top of the operating system for managing data storage and optimization in accordance with example instances of the present disclosure. In this example, system 400 also includes network interface cards (NICs) 420 and 421 connected to the peripheral bus for providing network interfaces to external storage, such as Network Attached Storage (NAS) and other computer systems that can be used for distributed parallel processing.

[0175] FIG. 5 is a diagram showing a network 500 with a plurality of computer systems 502a, and 502b, a plurality of cell phones and personal data assistants 502c, and Network Attached Storage (NAS) 504a, and 504b. In example instances, systems 502a, 502b, and 502c can manage data storage and optimize data access for data stored in Network Attached Storage (NAS) 504a and 504b. A mathematical model can be used for the data and be evaluated using distributed parallel processing across computer systems 502a, and 502b, and cell phone and personal data assistant systems 502c. Computer systems 502a, and 502b, and cell phone and personal data assistant systems 502c can also provide parallel processing for adaptive data restructuring of the data stored in Network Attached Storage (NAS) 504a and 504b. FIG. 5 illustrates an example only, and a wide variety of other computer architectures and systems can be used in conjunction with the various instances of the present disclosure. For example, a blade server can be used to provide parallel processing. Processor blades can be connected through a back plane to provide parallel processing. Storage can also be connected to the back plane or as Network Attached Storage (NAS) through a separate network interface. In some example instances, processors can maintain separate memory spaces and transmit data through network interfaces, back plane or other connectors for parallel processing by other processors. In other instances, some or all of the processors can use a shared virtual address memory space.

[0176] FIG. 6 is a block diagram of a multiprocessor computer system using a shared virtual address memory space in accordance with an example instance. The system includes a plurality of processors 602a-f that can access a shared memory subsystem 604. The system incorporates a plurality of programmable hardware memory algorithm processors (MAPs) 606a-f in the memory subsystem 604. Each MAP 606a-f can comprise a memory 608a-f and one or more field programmable gate arrays (FPGAs) 610a-f The MAP provides a configurable functional unit and particular algorithms or portions of algorithms can be provided to the FPGAs 610a-f for processing in close coordination with a respective processor. For example, the MAPs can be used to evaluate algebraic expressions regarding the data model and to perform adaptive data restructuring in example instances. In this example, each MAP is globally accessible by all of the processors for these purposes. In one configuration, each MAP can use Direct Memory Access (DMA) to access an associated memory 608a-f, allowing it to execute tasks independently of, and asynchronously from the respective microprocessor 602a-f In this configuration, a MAP can feed results directly to another MAP for pipelining and parallel execution of algorithms.

[0177] The above computer architectures and systems are examples only, and a wide variety of other computer, cell phone, and personal data assistant architectures and systems can be used in connection with example instances, including systems using any combination of general processors, co-processors, FPGAs and other programmable logic devices, system on chips (SOCs), application specific integrated circuits (ASICs), and other processing and logic elements. In some instances, all or part of the computer system can be implemented in software or hardware. Any variety of data storage media can be used in connection with example instances, including random access memory, hard drives, flash memory, tape drives, disk arrays, Network Attached Storage (NAS) and other local or distributed data storage devices and systems.

[0178] In example instances, the computer system can be implemented using software modules executing on any of the above or other computer architectures and systems. In other instances, the functions of the system can be implemented partially or completely in firmware, programmable logic devices such as field programmable gate arrays (FPGAs) as referenced in FIG. 4, system on chips (SOCs), application specific integrated circuits (ASICs), or other processing and logic elements. For example, the Set Processor and Optimizer can be implemented with hardware acceleration through the use of a hardware accelerator card, such as accelerator card 422 illustrated in FIG. 4.

[0179] The following examples are set forth to illustrate more clearly the principle and practice of embodiments disclosed herein to those skilled in the art and are not to be construed as limiting the scope of any claimed embodiments. Unless otherwise stated, all parts and percentages are on a weight basis.

### EXAMPLES

[0180] The following examples are given for the purpose of illustrating various embodiments of the disclosure and are not meant to limit the present disclosure in any fashion. The present examples, along with the methods described herein are presently representative of preferred embodiments, are exemplary, and are not intended as limitations on the scope of the disclosure. Changes therein and other uses which are encompassed within the spirit of the disclosure as defined by the scope of the claims will occur to those skilled in the art.

### Example 1: Functionalization of a Device Surface

[0181] A device was functionalized to support the attachment and synthesis of a library of polynucleotides. The device surface was first wet cleaned using a piranha solution comprising 90% H₂SO₄ and 10% H₂O₂ for 20 minutes. The device was rinsed in several beakers with DI water, held under a DI water gooseneck faucet for 5 min, and dried with N₂. The device was subsequently soaked in NH₄OH (1:100; 3 mL:300 mL) for 5 min, rinsed with DI water using a handgun, soaked in three successive beakers with DI water for 1 min each, and then rinsed again with DI water using the handgun. The device was then plasma cleaned by exposing the device surface to O₂. A SAMCO PC-300 instrument was used to plasma etch O₂ at 250 watts for 1 min in downstream mode.

[0182] The cleaned device surface was actively functionalized with a solution comprising N-(3-triethoxysilylpropyl)-4-hydroxybutyramide using a YES-1224P vapor deposition oven system with the following parameters: 0.5 to 1 torr, 60 min, 70° C., 135° C. vaporizer. The device surface was resist coated using a Brewer Science 200X spin coater. SPR™ 3612 photoresist was spin coated on the device at 2500 rpm for 40 sec. The device was pre-baked for 30 min at 90° C. on a Brewer hot plate. The device was subjected to photolithography using a Karl Suss MA6 mask aligner instrument. The device was exposed for 2.2 sec and developed for 1 min in MSF 26A. Remaining developer was rinsed with the handgun and the device soaked in water for 5 min. The device was baked for 30 min at 100° C. in the oven, followed by visual inspection for lithography defects using a Nikon L200. A descum process was used to remove residual resist using the SAMCO PC-300 instrument to O₂ plasma etch at 250 watts for 1 min.

[0183] The device surface was passively functionalized with a 100 μL solution of perfluorooctyltrichlorosilane mixed with 10 μl light mineral oil. The device was placed in a chamber, pumped for 10 min, and then the valve was closed to the pump and left to stand for 10 min. The chamber was vented to air. The device was resist stripped by performing two soaks for 5 min in 500 mL NMP at 70° C. with ultrasonication at maximum power (9 on Crest system). The device was then soaked for 5 min in 500 mL isopropanol at room temperature with ultrasonication at maximum power. The device was dipped in 300 mL of 200 proof ethanol and blown dry with N₂. The functionalized surface was activated to serve as a support for polynucleotide synthesis.

### Example 2: Synthesis of a 50-Mer Sequence on an Oligonucleotide Synthesis Device

[0184] A two dimensional oligonucleotide synthesis device was assembled into a flowcell, which was connected to a flowcell (Applied Biosystems (ABI394 DNA Synthesizer”). The two-dimensional oligonucleotide synthesis device was uniformly functionalized with N-(3-TRIETHOXYSILYLPROPYL)-4-HYDROXYBUTYRAMIDE (Gelest) was used to synthesize an exemplary polynucleotide of 50 bp (“50-mer polynucleotide”) using polynucleotide synthesis methods described herein.

[0185] The sequence of the 50-mer was as described. 5′AGACAATCAACCATTTGGGGTGGACAGCCTTGACCTCTAGACTTCGGCATOTTTTTT TTTT3′ (SEQ ID NO: 4213), where # denotes Thymidine-succinyl hexamide CED phosphoramidite (CLP-2244 from ChemGenes), which is a cleavable linker enabling the release of oligos from the surface during deprotection.

[0186] The synthesis was done using standard DNA synthesis chemistry (coupling, capping, oxidation, and deblocking) according to the protocol in Table 4 and an ABI synthesizer.

TABLE 4
Synthesis protocols
Table 4

| General DNA Synthesis | | |
|---|---|---|
| Process Name | Process Step | Time (sec) |
| WASH (Acetonitrile Wash | Acetonitrile System Flush | 4 |
| Flow) | Acetonitrile to Flowcell | 23 |
| | N2 System Flush | 4 |
| | Acetonitrile System Flush | 4 |
| DNA BASE ADDITION | Activator Manifold Flush | 2 |
| (Phosphoramidite + | Activator to Flowcell | 6 |
| Activator Flow) | Activator + | 6 |
| | Phosphoramidite to | |
| | Flowcell | |
| | Activator to Flowcell | 0.5 |
| | Activator + | 5 |
| | Phosphoramidite to | |
| | Flowcell | |
| | Activator to Flowcell | 0.5 |
| | Activator + | 5 |
| | Phosphoramidite to | |
| | Flowcell | |
| | Activator to Flowcell | 0.5 |
| | Activator + | 5 |
| | Phosphoramidite to | |
| | Flowcell | |
| | Incubate for 25 sec | 25 |
| WASH (Acetonitrile Wash | Acetonitrile System Flush | 4 |
| Flow) | Acetonitrile to Flowcell | 15 |
| | N2 System Flush | 4 |
| | Acetonitrile System Flush | 4 |
| DNA BASE ADDITION | Activator Manifold Flush | 2 |
| (Phosphoramidite + | Activator to Flowcell | 5 |
| Activator Flow) | Activator + | 18 |
| | Phosphoramidite to | |
| | Flowcell | |
| | Incubate for 25 sec | 25 |
| WASH (Acetonitrile Wash | Acetonitrile System Flush | 4 |
| Flow) | Acetonitrile to Flowcell | 15 |
| | N2 System Flush | 4 |
| | Acetonitrile System Flush | 4 |
| CAPPING (CapA + B, 1:1, | CapA + B to Flowcell | 15 |
| Flow) | | |
| WASH (Acetonitrile Wash | Acetonitrile System Flush | 4 |
| Flow) | Acetonitrile to Flowcell | 15 |
| | Acetonitrile System Flush | 4 |
| OXIDATION (Oxidizer | Oxidizer to Flowcell | 18 |
| Flow) | | |
| WASH (Acetonitrile Wash | Acetonitrile System Flush | 4 |
| Flow) | N2 System Flush | 4 |
| | Acetonitrile System Flush | 4 |
| | Acetonitrile to Flowcell | 15 |
| | Acetonitrile System Flush | 4 |
| | Acetonitrile to Flowcell | 15 |
| | N2 System Flush | 4 |
| | Acetonitrile System Flush | 4 |
| | Acetonitrile to Flowcell | 23 |
| | N2 System Flush | 4 |
| | Acetonitrile System Flush | 4 |
| DEBLOCKING (Deblock | Deblock to Flowcell | 36 |
| Flow) | | |
| WASH (Acetonitrile Wash | Acetonitrile System Flush | 4 |
| Flow) | N2 System Flush | 4 |
| | Acetonitrile System Flush | 4 |
| | Acetonitrile to Flowcell | 18 |
| | N2 System Flush | 4.13 |
| | Acetonitrile System Flush | 4.13 |
| | Acetonitrile to Flowcell | 15 |

[0187] The phosphoramidite/activator combination was delivered similar to the delivery of bulk reagents through the flowcell. No drying steps were performed as the environment stays “wet” with reagent the entire time.

[0188] The flow restrictor was removed from the ABI 394 synthesizer to enable faster flow. Without flow restrictor, flow rates for amidites (0.1M in ACN), Activator, (0.25M Benzoylthiotetrazole (“BTT”; 30-3070-xx from GlenResearch) in ACN), and Ox (0.02M I2 in 20% pyridine, 10% water, and 70% THF) were roughly ˜100 uL/sec, for acetonitrile (“ACN”) and capping reagents (1:1 mix of CapA and CapB, wherein CapA is acetic anhydride in THF/Pyridine and CapB is 16% 1-methylimidizole in THF), roughly ˜200 uL/sec, and for Deblock (3% dichloroacetic acid in toluene), roughly ˜300 uL/sec (compared to −50 uL/sec for all reagents with flow restrictor). The time to completely push out Oxidizer was observed, the timing for chemical flow times was adjusted accordingly and an extra ACN wash was introduced between different chemicals. After polynucleotide synthesis, the chip was deprotected in gaseous ammonia overnight at 75 psi. Five drops of water were applied to the surface to recover polynucleotides. The recovered polynucleotides were then analyzed on a BioAnalyzer small RNA chip.

### Example 3: Synthesis of a 100-Mer Sequence on an Oligonucleotide Synthesis Device

[0189] The same process as described in Example 2 for the synthesis of the 50-mer sequence was used for the synthesis of a 100-mer polynucleotide (“100-mer polynucleotide”; 5′ CGGGATCCTTATCGTCATCGTCGTACAGATCCCGACCCATTTGCTGTCCACCAGTCATG CTAGCCATACCATGATGATGATGATGATGAGAACCCCGCAT ##TTTTTTTTTT3′ (SEQ ID NO: 4214), where # denotes Thymidine-succinyl hexamide CED phosphoramidite (CLP-2244 from ChemGenes) on two different silicon chips, the first one uniformly functionalized with N-(3-TRIETHOXYSILYLPROPYL)-4-HYDROXYBUTYRAMIDE and the second one functionalized with 5/95 mix of 11-acetoxyundecyltriethoxysilane and n-decyltriethoxysilane, and the polynucleotides extracted from the surface were analyzed on a BioAnalyzer instrument.

[0190] All ten samples from the two chips were further PCR amplified using a forward (5′ATGCGGGGTTCTCATCATC3′ (SEQ ID NO: 4215)) and a reverse (5′CGGGATCCTTATCGTCATCG3′ (SEQ ID NO: 4216)) primer in a 50 uL PCR mix (25 uL NEB Q5 mastermix, 2.5 uL 10 uM Forward primer, 2.5 uL 10 uM Reverse primer, 1 uL polynucleotide extracted from the surface, and water up to 50 uL) using the following thermalcycling program:

[0191] 98° C., 30 sec

[0192] 98° C., 10 sec; 63° C., 10 sec; 72° C., 10 sec; repeat 12 cycles

[0193] 72° C., 2 min

[0194] The PCR products were also run on a BioAnalyzer, demonstrating sharp peaks at the 100-mer position. Next, the PCR amplified samples were cloned, and Sanger sequenced. Table 5 summarizes the results from the Sanger sequencing for samples taken from spots 1-5 from chip 1 and for samples taken from spots 6-10 from chip 2.

TABLE 5
Sequencing results

| Spot | Error rate | Cycle efficiency |
|---|---|---|
| 1 | 1/763 bp | 99.87% |
| 2 | 1/824 bp | 99.88% |
| 3 | 1/780 bp | 99.87% |
| 4 | 1/429 bp | 99.77% |
| 5 | 1/1525 bp | 99.93% |
| 6 | 1/1615 bp | 99.94% |
| 7 | 1/531 bp | 99.81% |
| 8 | 1/1769 bp | 99.94% |
| 9 | 1/854 bp | 99.88% |
| 10 | 1/1451 bp | 99.93% |

[0195] Thus, the high quality and uniformity of the synthesized polynucleotides were repeated on two chips with different surface chemistries. Overall, 89% of the 100-mers that were sequenced were perfect sequences with no errors, corresponding to 233 out of 262.

[0196] Table 6 summarizes error characteristics for the sequences obtained from the polynucleotides samples from spots 1-10.

TABLE 6
Error characteristics

| Sample ID/Spot no. | OSA_0046/1 | OSA_0047/2 | OSA_0048/3 | OSA_0049/4 | OSA_0050/5 |
|---|---|---|---|---|---|
| Total Sequences | 32 | 32 | 32 | 32 | 32 |
| Sequencing Quality | 25 of 28 | 27 of 27 | 26 of 30 | 21 of 23 | 25 of 26 |
| Oligo Quality | 23 of 25 | 25 of 27 | 22 of 26 | 18 of 21 | 24 of 25 |
| ROI Match Count | 2500 | 2698 | 2561 | 2122 | 2499 |
| ROI Mutation | 2 | 2 | 1 | 3 | 1 |
| ROI Multi | 0 | 0 | 0 | 0 | 0 |
| Base Deletion | | | | | |
| ROI Small | 1 | 0 | 0 | 0 | 0 |
| Insertion | | | | | |
| ROI Single | 0 | 0 | 0 | 0 | 0 |
| Base Deletion | | | | | |
| Large Deletion | 0 | 0 | 1 | 0 | 0 |
| Count | | | | | |
| Mutation: G > A | 2 | 2 | 1 | 2 | 1 |
| Mutation: T > C | 0 | 0 | 0 | 1 | 0 |
| ROI Error Count | 3 | 2 | 2 | 3 | 1 |
| ROI Error Rate | Err: ~1 in 834 | Err: ~1 in 1350 | Err: ~1 in 1282 | Err: ~1 in 708 | Err: ~1 in 2500 |
| ROI Minus Primer | MP Err: ~1 in 763 | MP Err: ~1 in 824 | MP Err: ~1 in 780 | MP Err: ~1 in 429 | MP Err: ~1 in 1525 |
| Error Rate | | | | | |
| Sample ID/Spot no. | OSA_0051/6 | OSA_0052/7 | OSA_0053/8 | OSA_0054/9 | OSA_0055/10 |
| Total Sequences | 32 | 32 | 32 | 32 | 32 |
| Sequencing Quality | 29 of 30 | 27 of 31 | 29 of 31 | 28 of 29 | 25 of 28 |
| Oligo Quality | 25 of 29 | 22 of 27 | 28 of 29 | 26 of 28 | 20 of 25 |
| ROI Match Count | 2666 | 2625 | 2899 | 2798 | 2348 |
| ROI Mutation | 0 | 2 | 1 | 2 | 1 |
| ROI Multi | 0 | 0 | 0 | 0 | 0 |
| Base Deletion | | | | | |
| ROI Small | 0 | 0 | 0 | 0 | 0 |
| Insertion | | | | | |
| ROI Single | 0 | 0 | 0 | 0 | 0 |
| Base Deletion | | | | | |
| Large Deletion | 1 | 1 | 0 | 0 | 0 |
| Count | | | | | |
| Mutation: G > A | 0 | 2 | 1 | 2 | 1 |
| Mutation: T > C | 0 | 0 | 0 | 0 | 0 |
| ROI Error Count | 1 | 3 | 1 | 2 | 1 |
| ROI Error Rate | Err: ~1 in 2667 | Err: ~1 in 876 | Err: ~1 in 2900 | Err: ~1 in 1400 | Err: ~1 in 2349 |
| ROI Minus Primer | MP Err: ~1 in 1615 | MP Err: ~1 in 531 | MP Err: ~1 in 1769 | MP Err: ~1 in 854 | MP Err: ~1 in 1451 |
| Error Rate | | | | | |

### Example 4: Identification of Antibodies

[0197] Antibodies to be used with the lateral flow device were identified.

[0198] Briefly, antibodies were identified using phage display. Antibody expressing bacteriophage libraries were panned against the SARS-CoV-2 spike protein for binding, screened for binding after 3-4 panning rounds, and then underwent DNA sequencing to determine the sequence of the antibody being expressed. This process yielded 1,152 sequences (3×384 samples) analyzed via next-generation DNA sequencing (NGS).

[0199] A panel of antibodies were identified that comprise high affinity binding to S1 monomer and S trimer in ELISA (data not shown). Using surface plasmon resonance, many of the antibodies were determined to bind with subnanomolar binding to SARS-CoV-2 S1 monomer and/or S trimer (FIG. 7A). Ab-7 and Ab-4 showed no binding to the related SARS-CoV virus S1 protein (FIG. 7B). For Ab-7 and Ab-4, the SARS-CoV S1 binding affinities were in the micromolar range.

[0200] Ab-1 and Ab-8 were further analysis used CE-SDS gel and electropherograms. 2 uL of sample was used and reduced using 34 mM DTT. Data for Ab-1 and Ab-8 are seen in FIGS. 7C-7D and Table 7.

TABLE 7

| | Concentration | Available Yield |
|---|---|---|
| Name | (mg/mL) | (mg) |
| Ab-1 | 4.13 | 103.5 |
| Ab-8 (Lot 13092) | 5.44 | 76.1 |
| Ab-8 (Lot 13093) | 9.35 | 177.6 |

### Example 5: Lateral Flow Device

[0201] A lateral flow device using the antibodies identified was designed.

[0202] Antibodies described in Example 4 were used in a lateral flow device. Ab-1 captured SARS-CoV-2 spike protein in a concentration dependent manner and bound antigen with either Ab-7, Ab-4, or a control antibody CR3022 (Abcam) was detected (FIG. 8). The data shows that the SARS-CoV-2 spike protein was captured and presented for detection by a complementary sandwich pair with Ab-7 or Ab-4 that was improved as compared to the control antibody.

[0203] The antibodies were further screened for improved pairs of antibodies. Detector antibodies were conjugated with latex via Amide Beads. The following capture and detector antibody pairs were identified: Ab-1 capture with either Ab-2 or Ab-3 detector; Ab-4 capture with either Ab-2, Ab-5, or Ab-6 detector; Ab-7 capture with either Ab-5 or Ab-1 detector; and Ab-3 capture with Ab-2 detector. Exemplary results using the lateral flow device is seen in FIG. 9.

[0204] Initial limit of detection (LOD) assessments were also performed. Ab-3/Ab-2 and Ab-1/Ab-3 was observed to have a linear curve with an unoptimized LOD of about 125 and 63 ng/mL, respectively.

### Example 6: Lateral Flow Assay

[0205] A lateral flow assay was performed using the antibodies described herein.

[0206] Details of the lateral flow assay are seen in Table 8.

TABLE 8

| Target Analyte | SRAS-CoV-2 Spike Protein |
|---|---|
| Particle System | Colloidal Gold (Lumos) |
| Data Output | Colorimetric (Absorbance) |
| Detector Antibody | Ab-8 |
| Test Line (Capture | Ab-1 |
| Antibody) | |
| Membrane | Unbacked CN140 |
| Waste Pad | A440 (Ahlstrom) |
| Sample Pad | Ahlstrom 6614 treated with PVP-10, PVA, |
| | IGEPAL CA-60 in Citrate buffer |
| Conjugate Pad | Ahlstrom 8950 treated with BSA and |
| | Tween-20 in Borate buffer |
| Antibody Loading | 6 μg antibody per mL per OD gold |
| Conjugate | OD10 |
| Concentration | |
| Conjugate Spray Rate | 10 μL/cm |
| Conjugate Diluent | Colloidal gold resuspension buffer + |
| Buffer | 10% sucrose + 5% trehalose |
| Assay Performance | Performance at Feasibility |
| Sensitivity | 10 ng/ml |
| Time to result | 15 minutes |
| Matrix | Pure Sal Saliva |

[0207] Using the lateral flow assay, a dry test strip limit of detection was tested using saliva. The data is seen in FIGS. 10A-10B. FIG. 10A shows the dry system successfully detected 7.8 ng/mL of SARS-CoV-2 spike trimer protein that was spiked into salvia and showed a linear curve as the concentration of spike protein increases. FIG. 10B shows the limit of detection is close to 10 ng/mL SARS-CoV-2 spike trimer protein. The lateral flow device was also assayed for whether the spike trimer can pass through the device. As seen in FIG. 10C, the spike trimer passed through the device and a signal was detected.

[0208] The lateral flow assay was then tested using inactivated virus and live virus on swabs. Spike inactivated virus in saliva was passed through the lateral flow device as was spike inactivated virus in raw saliva. FIG. 11A shows data on test strips testing inactivated virus. As seen in FIG. 11A, positive signal was observed for both the heat and BPL inactivated virus. Signal was also observed when the virus mixed with raw saliva was passed through the lateral flow device. FIG. 11B shows data from live virus on swabs. Swab samples in saline were tested using strips. 60 uL of sample was added to the strip and a photo was taken at 15 minutes. All positive swab showed a test line at varying intensities and very little background was observed from the negative swab (FIG. 11B).

[0209] This Example shows that the lateral flow assay is able to detect SARS-CoV-2 protein in saliva samples.

### Example 7. Rapid Antigen Detection Test Kit

[0210] An exemplary schema of the rapid antigen detection (RAD) test kit comprising a lateral flow device is seen in FIG. 12.

[0211] Spike protein was added to saliva and was measured using the lateral flow device. Data from the lateral flow device was compared to results from PCR. As seen in FIGS. 13A-13B, the lateral flow device gave similar results as using PCR. The lateral flow device was also used to test SARS-CoV-2 positive saliva samples. As seen in FIG. 13C, the lateral flow device positively identified two of the three samples that were SARS-CoV-2 positive. FIG. 13D shows data using the lateral flow device to detect SARS-CoV-2 in saliva samples from five additional SARS-CoV-2 positive samples. Using the cassette improved the signal of the test line as seen in FIG. 13E.

### Example 8. Multiplexed SARS-CoV-2 Antigen Test

[0212] A SARS-CoV-2 lateral flow assay containing a cocktail of antibodies that can detect multiple SARS-CoV-2 specific antigens, specifically the Spike and Nucleocapsid proteins, was developed. The lateral flow assay contains a capture and detector antibody for each antigen. The nucleocapsid specific antibodies are commercially available and the spike protein antibodies were created at Twist Bioscience with Ab-9 detector and Ab-10 capture antibodies. As seen in FIG. 14A, a 3-line system with recombinant protein spiked into negative saliva demonstrates the specificity of the test. As seen in FIG. 14B, a 2-line system with recombinant protein spiked into transfer buffer and nasal swabs from covid-19 positive patients demonstrated the specificity of the test.

### Example 9: Integrated Cassette for Saliva Detection

[0213] A kit for a rapid saliva detection assay is shown in FIGS. 14C-14E. FIG. 14C depicts the kit as assembled. FIG. 14D depicts the individual components of the kit, which includes a saliva collection device and a lateral flow cassette. The use is depicted in FIGS. 15A-15B. The cassette is opened and placed horizontally on the bench. The syringe barrel is locked into the cassette port. The swab is placed in the mouth of the subject where saliva has pooled until the red circle on the saliva collection device is completely full. The swab is compressed until the red conjugate can be seen flowing along the cassette string. After 10 minutes, the assay is complete. Presence of a control line and presence of the test line indicates that SARS-COV-2 has been detected. Presence of the control line only indicates that SARS-COV-2 has not been detected. Presence of the test line only indicates the test is invalid.

### Example 10: Open Well Cassette for Saliva Detection

[0214] An Open Well Cassette is used to detect SARS-COV-2 as depicted in FIGS. 16A-16B. The swab is placed in the mouth to collect saliva for 5 minutes. The Eppendorf tube is attached to the base of the syringe barrel. The swab is placed in the syringe barrel and compressed to transfer saliva into the Eppendorf tube. The 80 μL fixed volume pipette is filled with saliva. The saliva is emptied from the pipette into the sample well. After 10 minutes, the assay is complete. Presence of a control line and presence of the test line indicates that SARS-COV-2 has been detected. Presence of the control line only indicates that SARS-COV-2 has not been detected. Presence of the test line only indicates the test is invalid.

### Example 11: Detection of Viral Load Using Open Well Cassette

[0215] Coronavirus was spiked into saliva to a final concentration of 10⁶ TCID50/mL, 10⁵ TCID50/mL, 10⁴ TCID50/mL, 10³ TCID50/mL, 10² TCID50/mL, or transfer buffer only. The saliva was analyzed using the open well cassette device described in Example 10. As depicted in FIG. 17, the open well cassette device was able to detect virus levels at levels as low as 10³ TCID50/mL. This results in detection of virus at viral levels consistently found in infectious individuals.

### Example 12: Detection of Viral Load

[0216] Live virus was spiked into viral samples. The concentrations were 10⁷ copies/mL, 10⁶ copies/mL, and 10⁵ copies/mL. 10⁶ copies per mL is approximately 2.16×10⁴ TCID50/mL. The saliva samples, as well as positive and negative controls were analyzed using an open well device with VHH trimer and commercial gold conjugate. As depicted in FIG. 18A and FIG. 18B, all cassettes testing positive controls displayed both the test and the control line, while all cassettes testing negative controls displayed only the control line. As depicted in FIG. 18C, the cassettes were able to detect viral loads of 10⁷ copies/mL and 10⁶ copies/mL, as indicated by both the control and test line. As depicted in FIG. 18D, cassettes tested with concentrations of 10³ copies per mL displayed only the control line.

### Example 13: Clinical Trial

[0217] Patients with symptoms of COVID-19 were given both a PCR test and the saliva assay described in Example 10. The saliva was tested immediately and the samples were identified as positive or negative by eye. The results were recorded by pictures taken in a light box. FIG. 19 depicts representative samples of the results. 10 of the 10 subjects tested were identified as positive for SARS-CoV-2 by both the saliva assay and the PCR analysis.

### Example 14: Double Purification of Saliva

[0218] Saliva was spiked with spike protein. Single purification and double purification of the saliva was performed. The saliva was then analyzed using the lateral flow cassette. Results are depicted in FIGS. 20A-20C. When compared to single purification of saliva (FIG. 20B), double purification of saliva (FIG. 20C) resulted in loss of nonspecific binding while resulting in no loss of signal.

### Example 15: Optimization of Conjugation of the Ab-10 Spike Trimer

[0219] The 201-1 spike trimer was conjugated to gold nanoparticles. Lateral flow strips using the conjugated trimer were tested at a pH of 4 and a pH of 10. The results are depicted in FIG. 21. Conjugation was successful at high pH values, however the signal was poor.

[0220] Biotinylated Ab-10 was conjugated to gold nanospheres and used as a detector antibody. Ab-10 and Ab-9 were tested as capture antibodies. The results are depicted in FIG. 22. Conjugation was successful, but binding to both captures was poor.

### Example 16: Nucleocapsid Antibody Screening

[0221] 7 conjugates were screened against 5 nucleocapsid antibodies in a lateral flow assay using buffer only. The results are depicted in FIG. 23A. Two potential candidate detector antibodies were identified. The two candidate antibodies were tested against capture antibodies. with nucleocapsid protein. Results are depicted in FIG. 23B. Conjugate 5 was the better detector antibody. Ab-89 (4^{th} test strip) showed the strongest capture.

[0222] The assay was optimized to result nonspecific binding on the N assay with the 5B-1-Ab-89 pair. A new buffer of 150 mM Tris, pH 8.8, 2% IGEPAL, 0.1% PVP, 0.05% PVA and 0.5% Tween20 was found to reduce nonspecific binding, as depicted in FIG. 23C. Further, this buffer did not affect the binding of the S assay, as depicted in FIG. 23D.

### Example 17: Combined Nucleocapsid and Spike Assay

[0223] A lateral flow strip assay to detect both nucleocapsid and spike protein was developed. The detector-capture pairs for nucleocapsid were 5B1 and Ab-89, and the detector-capture pair for spike protein was Ab-9 and Ab-10.

[0224] Different ratios of antibody pairs were tested. A 1:1 mix of both capture and detector antibodies resulted in nonspecific binding, as depicted in FIG. 24A. A 2:1 spike: nucleocapsid for the detector antibodies and a 1:1 spike: nucleocapsid ratio for the capture antibodies resulted in no nonspecific binding, as depicted in FIG. 24B.

[0225] Testing clinical samples resulted in all positive hits, as depicted in FIG. 25.

[0226] The buffer was optimized to reduce nonspecific binding for a 1:1 ratio of both detector and capture antibodies. A buffer of 150 mM Tris, pH 9; 2% IGEPAL, 0.1% PVP, 0.05% PVA, and 0.5% Tween20 resulted in no nonspecific binding, as depicted in FIG. 26.

[0227] Surfactants were added to reduce nonspecific binding to the nucleocapsid and spike assay. The sample pad was switched from CO48 to DVA. As depicted in FIG. 27, nonspecific binding was eliminated in the Double PurSal samples treated with 400 μL of 0.05% SDS/

[0228] A dose titration of inactivated virus samples and a dose titration of frozen nasopharyngeal samples was run on the nucleocapsid and spike lateral assay strips. As depicted in FIG. 28, in both the inactivated viral samples and the nasal pharyngeal samples, the virus could be detected up to a dilution of 1:256.

### Example 18: Comparison of Nucleocapsid and Spike Lateral Flow Assay to Spike Lateral Flow Assay

[0229] The nucleocapsid and spike combined lateral flow assay strips were compared to strips detecting spike alone. The strips were tested using dilutions of inactivated virus in saliva. As seen in FIG. 29, the nucleocapsid and spike (N+S) strips were able to detect virus at dilutions as low as 1:256. In contrast, the spike only strips (S) were able to detect virus at dilutions of 1:16 (faint)

[0230] The N+S strips were compared to the S strips using nasopharyngeal swab samples. The results are depicted in FIG. 30. The N+S assay was able to detect virus at a dilution as low as 1:1024. The S assay was able to detect virus at a dilution of 1:16 (faint).

### Example 19: Use of Mucolytic Agents

[0231] Saliva spiked with spike protein was combined with mucolytic agents. The saliva was then analyzed on the lateral flow cassette. As depicted in FIG. 31, there was a weakening or loss of the control line. Nonspecific binding was persistent.

### Example 20: Exemplary Sequences

[0232] Tables 9-14 demonstrate exemplary sequences for use in the assays described herein.

TABLE 9
Variable Domain Heavy Chain CDR Sequences

| | SEQ ID | | SEQ ID | | SEQ ID | |
|---|---|---|---|---|---|---|
| Variant | NO | CDRH1 | NO | CDRH2 | NO | CDRH3 |
| 1-1 | 148 | FTFSSYAMN | 883 | SAISGSGVSTYYA | 1618 | CAKGDSGSYYGSSYFDYW |
| 1-2 | 149 | FTFSSYGMS | 884 | SAISGSGGNTYYA | 1619 | CTRVRRGSGVAPYSSSWGRYY |
| | | | | | | FDYW |
| 1-3 | 150 | FRFSSYSMS | 885 | SAISGSGGSSYYA | 1620 | CAKDGSGTIFGVVIAKYYFDYW |
| 1-4 | 151 | FTFSAYAMS | 886 | SAISGSGGSTHYA | 1621 | CASWGPLWSGSPNDAFDIW |
| 1-5 | 152 | FFSSYAMG | 887 | SAISGSGYSTYYA | 1622 | CARVRSYDSTAYDEPLDALDIW |
| 1-6 | 153 | FTFSSFAMS | 888 | SAISGSGVSTYYA | 1623 | CGRDARSSGYNGYDLFDIW |
| 1-7 | 154 | FTFSAYAMS | 889 | SAISGSGGSYYA | 1624 | CAKGPLVGWYFDLW |
| 1-8 | 155 | FTFGSYAMS | 890 | SLISGSGGSTYYA | 1625 | CASWGPLWSGSPNDAFDIW |
| 1-9 | 156 | FTFSAYAMS | 891 | SAISGSGGSTFYA | 1626 | CTRQGDSSGWYDGWFDPW |
| 1-10 | 157 | FIFSSYAMS | 892 | SIISGSGGSTYYA | 1627 | CIATVVSPLDYW |
| 1-11 | 158 | FTFSDYAMS | 893 | STISGSGGSTYYA | 1628 | CARDESSSSLNWFDPW |
| 1-12 | 159 | FTFSSYAMI | 894 | SAISGSAGSTYYA | 1629 | CASPDPLGSVADLDYW |
| 1-13 | 160 | FTFGSYAMS | 895 | SAISGSGGTTYYA | 1630 | CARVWSSSSVFDYW |
| 1-14 | 161 | FTFSRYAMS | 896 | SAISGSGASTYYA | 1631 | CAKDRGGGSYYGTFDYW |
| 1-15 | 162 | STFSSYAMS | 897 | SAISGSGATYYA | 1632 | CTRVRVAGYSSSWYDAFDIW |
| 1-16 | 163 | FTFSSYAMT | 898 | SAISGSGGNTYYA | 1633 | CVKGTIPIFGVIRSAFDYW |
| 1-17 | 164 | FTFSSYVMS | 899 | SSISGSGGSTYYA | 1634 | CARGSGSYSFFDYW |
| 1-18 | 165 | FTFSSYAN | 900 | SAISGSGVSTYYA | 1635 | CATTPGPWIQLWFGGGFDYW |
| 1-19 | 166 | FTFSSYDMS | 901 | SAISGSAGSTTMR | 1636 | CAKDGLVVAGTFDYW |
| 1-20 | 167 | FTFSGYAMS | 902 | SALSGSGGSTYYA | 1637 | CARGALLEWLSRFDNW |
| 1-21 | 168 | FTLSSYAMS | 903 | SAISGSGGTTYYA | 1638 | CARDLGAADLIDYW |
| 1-22 | 169 | FIFSSYAMS | 904 | SAISGSGGTYYA | 1639 | CVRVPAAAGKGVPGIFDIW |
| 1-23 | 170 | FTFSSYAMG | 905 | SAIRGSGGSTYYA | 1640 | CARVRQGLRRTWYYFDYW |
| 1-24 | 171 | STFSSYAMS | 906 | SAIGGSGGSTYYA | 1641 | CAKEYSSSWFDPW |
| 1-25 | 172 | FTFSSYTMS | 907 | SAISVSGGSTYYA | 1642 | CAKREDYDFWSGRGAFDIW |
| 1-26 | 173 | FTFSSYAMY | 908 | SAISGSGGTYYA | 1643 | CAKDIGYSSSWSFDYW |
| 1-27 | 174 | FTFRSYAMS | 909 | SAISGSGRSTYY | 1644 | CARDDYSDYRPFDYW |
| 1-28 | 175 | FTFSSYTMS | 910 | SAISGSGGSIYYA | 1645 | CAHRPSLQWLDWWFDPW |
| 1-29 | 176 | FTFSSQAMS | 911 | SIISGSGGSTYYA | 1646 | CAKDGASGWPNWHFDLW |
| 1-30 | 177 | FTFSSYPMS | 912 | SAISGSGGRTYYA | 1647 | CAKGAAAGPFDYW |
| 1-31 | 178 | FTFSSYAMT | 913 | SAISGGTTYYA | 1648 | CAKEEYYYDSSGPNWFDPW |
| 1-32 | 179 | FTFSSYAMS | 914 | TAISVSGGSTYYA | 1649 | WAPQGGTTVPTGRFDPW |
| 1-33 | 180 | FTFSSYAMS | 915 | SAISGSSGSTYYA | 1650 | CSRGGGPAAGFHGLDVW |
| 1-34 | 181 | FTFSSYAVS | 916 | SAISASGGSTYYA | 1651 | CARAAKRQQLFPRNYFDYW |
| 1-35 | 182 | FTFSSYPMS | 917 | SAIRGSGGSTYYA | 1652 | CALHYGSGRSFDYW |
| 1-36 | 183 | FTFSSYGMS | 918 | SAISGSGGATYYA | 1653 | CARPGGRIVGALWGAFDYW |
| 3-1 | 184 | RTFCRYSMG | 919 | ATWRPANTNYA | 1654 | CAKNWGDAGTTWFEKSGW |
| 3-2 | 185 | NIFSRYIMG | 920 | AAISRTGGSTYYA | 1655 | CAIDPDGEW |
| 3-3 | 186 | RTLAGYTMG | 921 | AEIYPSGNGVYYA | 1656 | CAADVRDSIWRSW |
| 3-4 | 187 | STLSRYSMG | 922 | AAIARRERVYA | 1657 | CARLSCHDYSCYSAFDFW |
| 3-5 | 188 | SIFSSAAMG | 923 | AISWRTGTTYYA | 1658 | CAAAGSMGWNHLRDYDW |
| 3-6 | 189 | TFSGYLMG | 924 | AGIWRSGVSLYYA | 1659 | CAARSGWGAAMRSADFRW |
| 3-7 | 190 | RTFSSYDMG | 925 | AIIKSDGSTYYA | 1660 | CARSPRFSGVVVRPGLDLW |
| 3-8 | 191 | SISSYFMG | 926 | SSIGIAGTPTLYA | 1661 | CAACSDYYCSGVGAVW |
| 3-9 | 192 | PTFSTYAMG | 927 | AAVINGGTTNYA | 1662 | CAKDSWDSSGYSYHYYYYGM |
| | | | | | | DVW |
| 3-10 | 193 | IIGSFRTMG | 928 | GFTGSGRSQYYA | 1663 | CARGDIAVIQVLDYW |
| 3-11 | 194 | GTFASYGMG | 929 | AGIWEDSSAAHYA | 1664 | CAYSGIGTDW |
| 3-12 | 195 | LTFRNYAMG | 930 | AGITSGGTRNYA | 1665 | CAAGWGDSAW |
| 3-13 | 196 | SISTINVMG | 931 | AAISWGGGLTVYA | 1666 | CAAFDGYTGSDW |
| 3-14 | 197 | GTLSSYIG | 932 | ATVRSGSITNYA | 1667 | CAADLTDIWEGIREYDEYAW |
| 3-15 | 198 | RTFRRYPMG | 933 | VAVTWSGGSTYYA | 1668 | CAAGLRGRQYSW |
| 3-16 | 199 | STFSIDVMG | 934 | AAISWSGESTLYA | 1669 | CAAFDGYSGSDW |
| 3-17 | 200 | RTSSSAVMG | 935 | AAINRGGSTIYV | 1670 | CATGPYRSYFARSYLW |
| 3-18 | 201 | GTFSSYRMG | 936 | SAISWNDGGADYA | 1671 | CAATQWGSSGWKQARWYDW |
| 3-19 | 202 | TIFASAMG | 937 | AFSSSGGSTYYA | 1672 | CAKDPIAAADPGDSVSFDYW |
| 3-20 | 203 | FGIDAMG | 938 | ATITEGGATNVGSTS | 1673 | CALNVWRTSSDW |
| 3-21 | 204 | NIIGGNHMG | 939 | GAITSSRSTVYA | 1674 | CAAVTTQTYGYDW |
| 3-22 | 205 | RTFSRYDMG | 940 | GGTRSGSTNYA | 1675 | CARHSDYSGLSNFDYW |
| 3-23 | 206 | QPAPELRGYGMG | 941 | AAVIGSSGTTYYA | 1676 | CAKAKATVGLRAPFDYW |
| 3-24 | 207 | INFSRYGMG | 942 | ASITYLGRTNYA | 1677 | CALRVRPYGQYDW |
| 3-25 | 208 | RTFRRYAMG | 943 | AAINWSGARTYYA | 1678 | CAVSKPLNYYTYYDARRYDW |
| 3-26 | 209 | GTFGHYAMG | 944 | AAVSWSGSSTYYA | 1679 | CAVSQPLNYYTYYDARRYDW |
| 3-27 | 210 | FTLDDYAMG | 945 | AAISWSTGSTYYA | 1680 | CAASQAPITIATMMKPFYDW |
| 3-28 | 211 | FTFRRYDMG | 946 | SAISGGLAYYA | 1681 | CAVDLSGDAVYDW |
| 3-29 | 212 | INFSRNAMG | 947 | ASITHQDRPIYA | 1682 | CALPVGPYGQYDW |
| 3-30 | 213 | RTFTTYGMG | 948 | ASITYLGRTYYA | 1683 | CALRVRPYGQYDW |
| 3-31 | 214 | STFSINAMG | 949 | AGITSSGGYTNYA | 1684 | CAADGVPEYSDYASGPVW |
| 7-1 | 215 | FTFSNYAMR | 950 | SAISGSGGSTYYA | 1685 | CARHTGRYSSGSTGWFHYW |
| 7-2 | 216 | FAFSRHAMS | 951 | SDIGGSGSTTYYA | 1686 | CARTTFDNWFDPW |
| 7-3 | 217 | RTFSINAMG | 952 | AGITRSAVSTITSE | 1687 | CAADGVPEYSDYASGPVW |
| | | | | GTANYA | | |
| 7-4 | 218 | FTFSSYGMN | 953 | SASSGSGGSTYYA | 1688 | ARREYIESGFDSW |
| 7-5 | 219 | RTFSTDAMG | 954 | AAISSGGSTNYA | 1689 | CAATRGRSTRLVLPSLVEW |
| 7-6 | 220 | RIFYPMG | 955 | AAVRWSSTGIYYT | 1690 | CAAALSEVWRGSENLREGYD |
| | | | | QYA | | W |
| 7-7 | 221 | FTFGSYDMG | 956 | TAINWSGARTAYA | 1691 | CAARSVYSYEYNW |
| 7-8 | 222 | STFTINAMG | 957 | SGISHNGGTTNYA | 1692 | CAADGVPEYSDYASGPVW |
| 7-9 | 223 | GTFSSIGMG | 958 | AAISWDGGATAYA | 1693 | CAKEDVGKPFDW |
| 7-10 | 224 | RTYAMG | 959 | AEINWSGSSTYYA | 1694 | CAVDGPFGW |
| 7-11 | 225 | LPFSTKSMG | 960 | AAIHWSGLTSYA | 1695 | CAADRAADFFAQRDEYDW |
| 7-12 | 226 | RTIVPYTMG | 961 | AAISPSAFTEYA | 1696 | CAARRWGYDW |
| 7-13 | 227 | LRLNMHRMG | 962 | AAISGWSGGTNYA | 1697 | CAKIGTLWW |
| 7-14 | 228 | STFSINAMG | 963 | AGISRGGTTNYA | 1698 | CAADGVPEYSDYASGPVW |
| 7-15 | 229 | STLPYHAMG | 964 | ASISRFFGTAYYA | 1699 | CAPTFAAGASEYHW |
| 7-16 | 230 | FTFTSYAIS | 965 | SAISGSGGSTDYA | 1700 | CARGAYGSGTYDYW |
| 7-17 | 231 | FSLDYYGMG | 966 | AAITSGGTPHYA | 1701 | CASAYNPGIGYDW |
| 7-18 | 232 | LTDRRYTMG | 967 | ASITLGGSTAYA | 1702 | CAKEDVGKPFDW |
| 7-19 | 233 | RTFRRYTMG | 968 | ASITSSGVNAYA | 1703 | CAKEDVGKPFDW |
| 7-20 | 234 | PTFSIYAMG | 969 | AGISWNGGSTNYA | 1704 | CALRRRFGGQEW |
| 7-21 | 235 | RTISRYTMG | 970 | ASITSGGSTAYA | 1705 | CAKEDVGKPFDW |
| 7-22 | 236 | RTITRYTMG | 971 | ASITSGGSTAYA | 1706 | CAKQDVGKPFDW |
| 7-23 | 237 | FTFENHAMG | 972 | AEIYPSGSTIYA | 1707 | CAARILSRNW |
| 7-24 | 238 | FTFSRHAMN | 973 | STITGSGGSTNYA | 1708 | CAREVGLYYYGSGSSSRRLLG |
| | | | | | | RIDYYFDYW |
| 7-25 | 239 | FTFDDYSMG | 974 | ASIEWDGSTYYA | 1709 | CAAFDGYTGSDW |
| 7-26 | 240 | STFSINAMG | 975 | AGITSSGGYTNYA | 1710 | CAADGVPEYSDYASGPVW |
| 7-27 | 241 | QTFNMG | 976 | AEINWSGSSTYYA | 1711 | CAVDGPFGW |
| 7-28 | 242 | NTFSDNPMG | 977 | AILAWDSGSTYYA | 1712 | CTTDYSKLAITKLSYW |
| 7-29 | 243 | RTHSIYPMG | 978 | ASITSYGDTNYA | 1713 | CAARRWIPPGPIW |
| 7-30 | 244 | RTFSMHAMG | 979 | ASISSQGRTNYA | 1714 | CAAEVRNGSDYLPIDW |
| 7-31 | 245 | FTFSNYSMG | 980 | AAIHWNGDSTAYA | 1715 | CAAQTEDSAQYIW |
| 7-32 | 246 | STFSVNAMG | 981 | AGVTRGGYTNYA | 1716 | CAADGVPEYSDYASGPVW |
| 7-33 | 247 | SIGSINAMG | 982 | AGISNGGTTNYA | 1717 | CAADGVPEYSDYASGPVW |
| 7-34 | 248 | RTFGSYDMG | 983 | AFIHRSGGSTYYA | 1718 | CATFPAIVTDSDYDLGNDW |
| 7-35 | 249 | GTFGHYAMG | 984 | AAVSWSGSSTYYA | 1719 | CAVSQPLNYYTYYDARRYDW |
| 7-36 | 250 | FGFGSYDMG | 985 | TAINWSGARAYYA | 1720 | CAARSVYSYDYNW |
| 7-37 | 251 | STLSINAMG | 986 | AGITRSGSVTNYA | 1721 | CAADGVPEYSDYASGPVW |
| 7-38 | 252 | RPFSEYTMG | 987 | SSIHWGGRGTNYA | 1722 | CAAELHSSDYTSPGAYAW |
| 7-39 | 253 | RTFSNYPMG | 988 | AAITWSGDSTNYA | 1723 | CALPSNIITTDYLRVYW |
| 7-40 | 254 | RTFRRYTMG | 989 | ASITKFGSTNYA | 1724 | CAKEDVGKPFDW |
| 7-41 | 255 | RTFSTYVMG | 990 | ASISSRGITHYA | 1725 | CAKEDVGKPFDW |
| 7-42 | 256 | FTLDYYGMG | 991 | AAITSGGTPHYG | 1726 | CASAYNPGIGYDW |
| 7-43 | 257 | FTFGHYAMG | 992 | AAVSWSGSTTYYA | 1727 | CAVSHPLNYYTYYDARRYDW |
| 7-44 | 258 | FTFEDYAMG | 993 | AAITRGSNTTDYA | 1728 | CAARRWMGGSYFDPGNYDW |
| 7-45 | 259 | RTLSRYTMG | 994 | ASITSGGSTNYA | 1729 | CAKEDVGKPFDW |
| 8-1 | 260 | RTFASYAMG | 995 | GAISRSGDSTYYA | 1730 | CARAPFYCTTTKCQDNYYYM |
| | | | | | | DVW |
| 8-2 | 261 | GTYHAMG | 996 | AGITSDDRTNYA | 1731 | CARERRYYDSSGYPYYFDYW |
| 8-3 | 262 | TTLDYYAMG | 997 | AAISWSGGSTAYA | 1732 | CAREDYYDSSGYSW |
| 8-4 | 263 | GTLSRSRMG | 998 | AFIGSDTLYA | 1733 | CANLAYYDSSGYYDYW |
| 8-5 | 264 | GTFSFYNMG | 999 | AFISGNGGTSYA | 1734 | CAVVAMRMVTTEGPDVLDVW |
| 8-6 | 265 | FTFDYYAMG | 1000 | SAIDSEGRTSYA | 1735 | CARWGPFDIW |
| 8-7 | 266 | FPFSIWPMG | 1001 | AAVRWSSTGIYYT | 1736 | CTRSEYSSGWYDYW |
| | | | | QYA | | |
| 8-8 | 267 | FAESSSMG | 1002 | AAISWSGDITIYA | 1737 | CARGAPYFDHGSKSYRLFYFDYW |
| 8-9 | 268 | FTFGTTTMG | 1003 | AAISWSTGIAHYA | 1738 | CARGGPNYYASGRYPWFDPW |
| 8-10 | 269 | FIGNYHAMG | 1004 | AAVTWSGGTTNYA | 1739 | CAREGYYYDSSGYPYYFDYW |
| 4A-1 | 270 | RTFSDDTMG | 1005 | GGISWSGGNTYYA | 1740 | CATDPPLFW |
| 4A-2 | 271 | RTFGDYIMG | 1006 | AAINWSAGYTAYA | 1741 | CARASPNTGWHFDRW |
| 4A-3 | 272 | RTFSDDAMG | 1007 | AAINWSGGTTRYA | 1742 | CATDPPLFW |
| 4A-4 | 273 | RTFGDYIMG | 1008 | AAINWIAGYTADA | 1743 | CAEPSPNTGWHFDHW |
| 4A-5 | 274 | RTFGDDTMG | 1009 | AAINWSGGNTYYA | 1744 | CATDPPLFW |
| 4A-6 | 275 | RTFGDDTMG | 1010 | AAINWTGGYTPYA | 1745 | CATDPPLFW |
| 4A-7 | 276 | RTFGDYIMG | 1011 | AAINWSGGYTAYA | 1746 | CATASPNTGWHFDHW |
| 4A-8 | 277 | RTFGDYIMG | 1012 | GGINWSGGYTYYA | 1747 | CATDPPLFW |
| 4A-9 | 278 | RTFGDYIMG | 1013 | AAINWSGGYTHYA | 1748 | CATDPPLFW |
| 4A-10 | 279 | RTFSDDTMG | 1014 | AAIHWSGSSTRYA | 1749 | CATDPPLFW |
| 4A-11 | 280 | RTFGDYAMG | 1015 | APINWSGGSTYYA | 1750 | CATDPPLFW |
| 4A-12 | 281 | RTFGDDTMG | 1016 | AAINWSGGNTPYA | 1751 | CATDPPLFW |
| 4A-13 | 282 | RTFGDDTMG | 1017 | AAINWSGDNTHYA | 1752 | CATDPPLFW |
| 4A-14 | 283 | RTFSDDTMG | 1018 | AAINWSGGTTRYA | 1753 | CATDPPLFW |
| 4A-15 | 284 | RTFSDDTMG | 1019 | AAINWSGDSTYYA | 1754 | CATDPPLFW |
| 4A-16 | 285 | RTFSDYTMG | 1020 | AAINWSGGYTYYA | 1755 | CATDPPLFW |
| 4A-17 | 286 | RTFGDDTMG | 1021 | AAINWSGGNTDYA | 1756 | CATDPPLFW |
| 4A-18 | 287 | RTFGDYIMG | 1022 | AAINWSGGYTPYA | 1757 | CATDPPLFW |
| 4A-19 | 288 | RTFSDDTMG | 1023 | AAINWSGGSTYYA | 1758 | CATDPPLFW |
| 4A-20 | 289 | RTFGDDIMG | 1024 | AAIHWSAGYTRYA | 1759 | CATDPPLFWGHVDLW |
| 4A-21 | 290 | RTFSDDTMG | 1025 | AGMTWSGSSTFYA | 1760 | CATDPPLFW |
| 4A-22 | 291 | RTFGDYIMG | 1026 | AAINWSGDNTHYA | 1761 | CATDPPLFW |
| 4A-23 | 292 | RTFSDDAMG | 1027 | AGISWNGGSIYYA | 1762 | CATDPPLFW |
| 4A-24 | 293 | RTFSDYTMG | 1028 | AAINWSGGTTYYA | 1763 | CATDPPLFW |
| 4A-25 | 294 | GTFSRYAMG | 1029 | SAVDSGGSTYYA | 1764 | CAASPSLRSAWQW |
| 4A-26 | 295 | RTFSDDTMG | 1030 | AAVNWSGGSTYYA | 1765 | CATDPPLFW |
| 4A-27 | 296 | RTFGDYIMG | 1031 | AAINWSAGYTAYA | 1766 | CARATPNTGWHFDHW |
| 4A-28 | 297 | RTFGDDTMG | 1032 | AAINWNGGNTHYA | 1767 | CATDPPLFW |
| 4A-29 | 298 | RTFGDDTMG | 1033 | AAINWSGGYTYYA | 1768 | CATDPPLFW |
| 4A-30 | 299 | RTFGDYTMG | 1034 | AAINWTGGYTYYA | 1769 | CATDPPLFW |
| 4A-31 | 300 | RTFGDYIMG | 1035 | AAINWSAGYTAYA | 1770 | CATASPNTGWHFDHW |
| 4A-32 | 301 | FTFDDYEMG | 1036 | AAISWRGGTTYYA | 1771 | CAADRRGLASTRAGDYDW |
| 4A-33 | 302 | FTFSRHDMG | 1037 | AGINWESGSTNYA | 1772 | CAADRGVYGGRWYRTSQYTW |
| 4A-34 | 303 | RTFGDYIMG | 1038 | AAINWSADYTAYA | 1773 | CATDPPLFCWHFDHW |
| 4A-35 | 304 | QLANFASYAMG | 1039 | AAITRSGSSTVYA | 1774 | CATTMNPNPRW |
| 4A-36 | 305 | RTFGDYIMG | 1040 | AAINWSAGYTAYA | 1775 | CATAPPLFCWHFDHW |
| 4A-37 | 306 | RTFGDYGMG | 1041 | ATINWSGALTHYA | 1776 | CATLPFYDFWSGYYTGYYYMDVW |
| 4A-38 | 307 | RTFSDDTMG | 1042 | AAITWSGGRTRYA | 1777 | CATDRPLFW |
| 4A-39 | 308 | RTFSNAAMG | 1043 | ARILWTGASRNYA | 1778 | CATTENPNPRW |
| 4A-40 | 309 | RTFSDDTMG | 1044 | AGINWSGNGVYYA | 1779 | CATDPPLFW |
| 4A-41 | 310 | RTFGDYIMG | 1045 | AAINWSGGTTPYA | 1780 | CATDPPLFCCHVDLW |
| 4A-42 | 311 | RTFGDDTMG | 1046 | AAINWSGGYTPYA | 1781 | CATDPPLFWGHVDLW |
| 4A-43 | 312 | RTFSDDTMG | 1047 | AAINWSGGSTDYA | 1782 | CATDPPLFW |
| 4A-44 | 313 | RTFGDYIMG | 1048 | AAINWSAGYTAYA | 1783 | CATARPNTGWHFDHW |
| 4A-45 | 314 | RTFSDDAMG | 1049 | AAINWSGGSTRYA | 1784 | CATDPPLFW |
| 4A-46 | 315 | RTFGDYIMG | 1050 | AAINWSAGYTPYA | 1785 | CATDPPLFWGHVDLW |
| 4A-47 | 316 | FTFGDYVMG | 1051 | AAINWNAGYTAYA | 1786 | CAKASPNTGWHFDHW |
| 4A-48 | 317 | RTFSDDAMG | 1052 | GRINWSGGNTYYA | 1787 | CATDPPLFW |
| 4A-49 | 318 | RTFGDYIMG | 1053 | AAINWSAGYTAYA | 1788 | CARASPNTGWHFDHW |
| 4A-50 | 319 | GTFSNSGMG | 1054 | AVVNWSGRRTYYA | 1789 | CAVPWMDYNRRDW |
| 2A-1 | 320 | FTFSNYATD | 1055 | SIISGSGGATYYA | 1790 | CAKGGYCSSDTCWWEYWLDPW |
| 2A-2 | 321 | FTFSRHAMN | 1056 | SGISGSGDETYYA | 1791 | CARDLPASYYDSSGYYWHNG |
| | | | | | | MDVW |
| 2A-3 | 322 | FTFSDFAMA | 1057 | SAISGSGDITYYA | 1792 | CAREADCLPSPWYLDLW |
| 2A-4 | 323 | FTFSDFAMA | 1058 | SAITGTGDITYYA | 1793 | CAREADGLHSPW |
| 2A-5 | 324 | FTFSDFAMA | 1059 | SAISGSGDITYYA | 1794 | CAREADGLHSPWHFDLW |
| 2A-6 | 325 | FTFSDFAMA | 1060 | SAISGSGDITYYA | 1795 | CAREADGLHSPWHFDLW |
| 2A-7 | 326 | FTFSDFAMA | 1061 | SAITGSGDITYYA | 1796 | CAREADGLHSPWHFDLW |
| 2A-8 | 327 | FTFSDFAMA | 1062 | SAISGSGDITYYA | 1797 | CAREADGLHSPWHFDLW |
| 2A-9 | 328 | FTFPRYAMS | 1063 | STISGSGSTTYYA | 1798 | CARLIDAFDIW |
| 2A-10 | 329 | FTFSAFAMG | 1064 | SAITASGDITYYA | 1799 | CARQSDGLPSPWHFDLG |
| 2A-11 | 330 | FTFSNYPMN | 1065 | STISGSGGNTFYA | 1800 | CVRHDEYSFDYW |
| 2A-12 | 331 | FTFSDYPMN | 1066 | STISGSGGITFYA | 1801 | CVRHDEYSFDYW |
| 2A-13 | 332 | FTFSDYPMN | 1067 | SAISGSGDNTYYA | 1802 | CVRHDEYSFDYW |
| 2A-14 | 333 | FTFSDYPMN | 1068 | SAITGSGDITYYA | 1803 | CVRHDEYSFDYW |
| 2A-15 | 334 | FTFSDYPMN | 1069 | STISGSGGITFYA | 1804 | CVRHDEYSFDYW |
| 3A-1 | 335 | FMFGNYAMS | 1070 | AAISGSGGSTYYA | 1805 | CAKDRGYSSSWYGGFDYW |
| 3A-2 | 336 | FTFRSHAMN | 1071 | SAISGSGGSTNYA | 1806 | CARGLKFLEWLPSAFDIW |
| 3A-3 | 337 | FTFRNYAMA | 1072 | SGISGSGGTTYYG | 1807 | CARGTRFLEWSLPLDVW |
| 3A-4 | 338 | FTFRNHAMA | 1073 | SGISGSGGTTYYG | 1808 | CARGTRFLQWSLPLDVW |
| 3A-5 | 339 | FTITNYAMS | 1074 | SGISGSGAGTYYA | 1809 | CARHAWWKGAGFFDHW |
| 3A-6 | 340 | FTIPNYAMS | 1075 | SGISGAGASTYYA | 1810 | CARHTWWKGAGFFDHW |
| 3A-7 | 341 | FTIPNYAMS | 1076 | SGISGSGASTYYA | 1811 | CARHTWWKGAGFFDHW |
| 3A-8 | 342 | FTITNYAMS | 1077 | SGISGSGASTYYA | 1812 | CARHTWWKGAGFFDHW |
| 3A-9 | 343 | FTITNYAMS | 1078 | SGISGSGAGTYYA | 1813 | CARHTWWKGAGFFDHW |
| 3A-10 | 344 | FTFRSHAMS | 1079 | SSISGGGASTYYA | 1814 | CARVKYLTTSSGWPRPYFDNW |
| 3A-11 | 345 | FTIRNYAMS | 1080 | SSISGGGASTYYA | 1815 | CARVKYLTTSSGWPRPYFDNW |
| 3A-12 | 346 | FTFRSHAMS | 1081 | SSISGGGASTYYA | 1816 | CARVKYLTTSSGWPRPYFDNW |
| 3A-13 | 347 | FTFRSHAMS | 1082 | SSISGGGASTYYA | 1817 | CARVKYLTTSSGWPRPYFDNW |
| 3A-14 | 348 | FTFRSYAMS | 1083 | SSISGGGASTYYA | 1818 | CARVKYLTTSSGWPRPYFDNW |
| 3A-15 | 349 | FTFSAYSMS | 1084 | SAISGSGGSRYYA | 1819 | CGRSKWPQANGAFDIW |
| 2A-1 | 350 | FTFSNYATD | 1085 | SIISGSGGATYYA | 1820 | CAKGGYCSSDTCWWEYWLDPW |
| 2A-10 | 351 | FTFSAFAMG | 1086 | SAITASGDITYYA | 1821 | CARQSDGLPSPWHFDLG |
| 2A-5 | 352 | FTFSDFAMA | 1087 | SAISGSGDITYYA | 1822 | CAREADGLHSPWHFDLW |
| 2A-2 | 353 | FTFSRHAMN | 1088 | SGISGSGDETYYA | 1823 | CARDLPASYYDSSGYYWHNG |
| | | | | | | MDVW |
| 2A-4 | 354 | FTFSDFAMA | 1089 | SAISGSGDITYYA | 1824 | CAREADGLHSPWHFDLW |
| 2A-6 | 355 | FTFSNYPMN | 1090 | STISGSGGNTFYA | 1825 | CVRHDEYSFDYW |
| 2A-11 | 356 | FTFSDFAMA | 1091 | SAITGSGDITYYA | 1826 | CAREADGLHSPWHFDLW |
| 2A-12 | 357 | FTFSDYPMN | 1092 | STISGSGGITFYA | 1827 | CVRHDEYSFDYW |
| 2A-13 | 358 | FTFSDYPMN | 1093 | SAISGSGDNTYYA | 1828 | CVRHDEYSFDYW |
| 2A-14 | 359 | FTFSDFAMA | 1094 | SAITGTGDITYYA | 1829 | CAREADGLHSPW |
| 2A-7 | 360 | FTFSDYPMN | 1095 | SAITGSGDITYYA | 1830 | CVRHDEYSFDYW |
| 2A-8 | 361 | FTFSDFAMA | 1096 | SAISGSGDITYYA | 1831 | CAREADGLHSPWHFDLW |
| 2A-15 | 362 | FTFSDFAMA | 1097 | SAISGSGDITYYA | 1832 | CAREADGLHSPWHFDLW |
| 2A-9 | 363 | FTFPRYAMS | 1098 | STISGSGSTTYYA | 1833 | CARLIDAFDIW |
| 2A-21 | 364 | FTFPRYAMS | 1099 | STISGSGSTTYYA | 1834 | CARLIDAFDIW |
| 2A-22 | 365 | FTFTTYALS | 1100 | SGISGSGDETYYA | 1835 | CTTGDDFWSGGNWFDPW |
| 2A-23 | 366 | FTFSRHAMN | 1101 | SGITGSGDETYYA | 1836 | CARDLPASYYDSSGYYWHNG |
| | | | | | | MDVW |
| 2A-24 | 367 | FVFSSYAMS | 1102 | SAISGSGGSSYYA | 1837 | CARVGGGYWYGIDVW |
| 2A-25 | 368 | FTLSSYVMS | 1103 | SGISGGGASTYYA | 1838 | CARGYSRNWYPSWFDPW |
| 2A-26 | 369 | FTFSTYAMS | 1104 | SSIGGSGSTTYYA | 1839 | CAGGWYLDYW |
| 2A-27 | 370 | FTYSNYAMT | 1105 | SAISGSSGSTYYA | 1840 | CASLCIVDPFDIW |
| 2A-28 | 371 | FTFSNYPMN | 1106 | STISGSGGNTFYA | 1841 | CVRHDEYSFDYW |
| 3A-10 | 372 | FTFRSHAMS | 1107 | SSISGGGASTYYA | 1842 | CARVKYLTTSSGWPRPYFDNW |
| 3A-4 | 373 | FTFSAYSMS | 1108 | SAISGSGGSRYYA | 1843 | CGRSKWPQANGAFDIW |
| 3A-7 | 374 | FMFGNYAMS | 1109 | AAISGSGGSTYYA | 1844 | CAKDRGYSSSWYGGFDYW |
| 3A-1 | 375 | FTFRNHAMA | 1110 | SGISGSGGTTYYG | 1845 | CARGTRFLQWSLPLDVW |
| 3A-5 | 376 | FTIPNYAMS | 1111 | SGISGAGASTYYA | 1846 | CARHTWWKGAGFFDHW |
| 3A-6 | 377 | FTFRNYAMA | 1112 | SGISGSGGTTYYG | 1847 | CARGTRFLEWSLPLDVW |
| 3A-15 | 378 | FTIRNYAMS | 1113 | SSISGGGASTYYA | 1848 | CARVKYLTTSSGWPRPYFDNW |
| 3A-3 | 379 | FTIPNYAMS | 1114 | SGISGSGASTYYA | 1849 | CARHTWWKGAGFFDHW |
| 3A-11 | 380 | FTITNYAMS | 1115 | SGISGSGAGTYYA | 1850 | CARHAWWKGAGFFDHW |
| 3A-8 | 381 | FTFRSHAMS | 1116 | SSISGGGASTYYA | 1851 | CARVKYLTTSSGWPRPYFDNW |
| 3A-2 | 382 | FTITNYAMS | 1117 | SGISGSGASTYYA | 1852 | CARHTWWKGAGFFDHW |
| 3A-12 | 383 | FTFRSHAMN | 1118 | SAISGSGGSTNYA | 1853 | CARGLKFLEWLPSAFDIW |
| 3A-14 | 384 | FTFRSHAMS | 1119 | SSISGGGASTYYA | 1854 | CARVKYLTTSSGWPRPYFDNW |
| 3A-9 | 385 | FTFRSYAMS | 1120 | SSISGGGASTYYA | 1855 | CARVKYLTTSSGWPRPYFDNW |
| 3A-13 | 386 | FTITNYAMS | 1121 | SGISGSGAGTYYA | 1856 | CARHTWWKGAGFFDHW |
| 3A-16 | 387 | FTFTNFAMS | 1122 | SAISGRGGGTYYA | 1857 | CARDAHGYYYDSSGYDDW |
| 3A-17 | 388 | FTFRSYPMS | 1123 | STISGSGGITYYA | 1858 | CAKGVYGSTVTTCHW |
| 3A-18 | 389 | FTLTSYAMS | 1124 | SAISGSGVDTYYA | 1859 | CARPTNWGFDYW |
| 3A-19 | 390 | FTFINYAMS | 1125 | STISTSGGNTYYA | 1860 | CARADSNWASSAYW |
| 3A-2 | 391 | FPFSTYAMS | 1126 | SGISVSGGFTYYA | 1861 | CARDPYSYGYYYYYGMDVW |
| 3A-21 | 392 | FTFSTYAMG | 1127 | SGISGGGVSTYYA | 1862 | CARARNWGPSDYW |
| 3A-22 | 393 | FIFSDYAMT | 1128 | SAISGSAFYA | 1863 | CARDATYSSSWYNWFDPW |
| 3A-23 | 394 | FTFSDYAMT | 1129 | SDISGSGGSTYYA | 1864 | CARGTVTSFDFW |
| 3A-24 | 395 | FTFSIYAMG | 1130 | SFISGSGGSTYYA | 1865 | CAKDYHSASWFSAAADYW |
| 3A-25 | 396 | FTFASYAMT | 1131 | SAISESGGSTYYA | 1866 | CAREGQEYSSGSSYFDYW |
| 3A-26 | 397 | FTFSEYAMS | 1132 | SAITGSGGSTYYG | 1867 | CARGSQTPYCGGDCPETFDYW |
| 3A-27 | 398 | FTFDDYAMS | 1133 | SGISGGGTSTYYA | 1868 | CARDLYSSGWYGFDYW |
| 3A-28 | 399 | FTFNNYAMN | 1134 | SAISGSVGSTYYA | 1869 | CARDNYDFWSGYYTNWFDPW |
| 3A-29 | 400 | FTFTNHAMS | 1135 | SAISGSGSNIYYA | 1870 | CARDSLSVTMGRGVVTYYYY |
| | | | | | | GMDFW |
| 4A-51 | 401 | PGTAIMG | 1136 | ARISTSGGSTKYA | 1871 | CARTTVIIPPLIW |
| 4A-52 | 402 | RSFSNSVMG | 1137 | ARITWNGGSTYYA | 1872 | CATTENPNPRW |
| 4A-53 | 403 | RTFGDDTMG | 1138 | AAVSWSGSGVYYA | 1873 | CATDPPLFW |
| 4A-54 | 404 | RTFSDARMG | 1139 | GAVSWSGGTTVYA | 1874 | CATTEDPYPRW |
| 4A-49 | 405 | RTFGDYIMG | 1140 | AAINWSAGYTAYA | 1875 | CARASPNTGWHFDHW |
| 4A-55 | 406 | SGLSINAMG | 1141 | AAISWSGGSTYTAYA | 1876 | CAAYQAGWGDW |
| 4A-39 | 407 | RTFSNAAMG | 1142 | ARILWTGASRNYA | 1877 | CATTENPNPRW |
| 4A-56 | 408 | FSLDYYGMG | 1143 | AAISWNGDFTAYA | 1878 | CAKRANPTGAYFDYW |
| 4A-33 | 409 | FTFSRHDMG | 1144 | AGINWESGSTNYA | 1879 | CAADRGVYGGRWYRTSQYTW |
| 4A-57 | 410 | LTFRNYAMG | 1145 | AAIGSGGYTDYA | 1880 | CAVKPGWVARDPSQYNW |
| 4A-25 | 411 | GTFSRYAMG | 1146 | SAVDSGGSTYYA | 1881 | CAASPSLRSAWQW |
| 4A-58 | 412 | FTLDYYDMG | 1147 | AAVTWSGGSTYYA | 1882 | CAADRRGLASTRAADYDW |
| 4A-59 | 413 | RTFGDYIMG | 1148 | AAINWSAGYTPYA | 1883 | CATAPPLFCWHFDLW |
| 4A-6 | 414 | RTFGDDIMG | 1149 | AAIHWSAGYTRYA | 1884 | CATDPPLFWGHVDLW |
| 4A-61 | 415 | RTFGDYIMG | 1150 | AAINWSADYTPYA | 1885 | CATAPPNTGWHFDHW |
| 4A-3 | 416 | RTFGDYIMG | 1151 | AAINWSAGYTAYA | 1886 | CATATPNTGWHFDHW |
| 4A-62 | 417 | RTFSDDTMG | 1152 | AAINWSGGSTDYA | 1887 | CATDPPLFW |
| 4A-43 | 418 | RTFGDDTMG | 1153 | AGINWSGGNTYYA | 1888 | CATDPPLFW |
| 4A-5 | 419 | RTFGDYIMG | 1154 | AAINWTGGYTSYA | 1889 | CATDPPLFW |
| 4A-42 | 420 | RTFGDDTMG | 1155 | AAINWSGGNTYYA | 1890 | CATDPPLFW |
| 4A-63 | 421 | RTFSDYTMG | 1156 | AAINWSGGYTYYA | 1891 | CATDPPLFW |
| 4A-6 | 422 | RTFGDYGMG | 1157 | ATINWSGALTHYA | 1892 | CATLPFYDFWSGYYTGYYYM |
| | | | | | | DVW |
| 4A-40 | 423 | RTFSDDTMG | 1158 | AGVTWSGSSTFYA | 1893 | CATDPPLFW |
| 4A-21 | 424 | RTFSDDIMG | 1159 | AAISWSGGNTHYA | 1894 | CATDPPLFW |
| 4A-64 | 425 | RTFGDYIMG | 1160 | AAINWSAGYTAYA | 1895 | CATASPNTGWHFDHW |
| 4A-47 | 426 | FTFDDDYVMG | 1161 | AAVSGSGDDTYYA | 1896 | CAADRRGLASTRAADYDW |
| 4A-65 | 427 | RTFGDYIMG | 1162 | AAINWSAGYTAYA | 1897 | CATEPPLSCWHFDLW |
| 4A-18 | 428 | RTFGDYIMG | 1163 | AAINWSGGYTPYA | 1898 | CATAPPNTGWHFDHW |
| 4A-66 | 429 | RTFGDDTMG | 1164 | AAINWSAGYTPYA | 1899 | CATDPPLFCCHFDLW |
| 4A-36 | 430 | RTFSDDTMG | 1165 | AAISWSGGFIRYA | 1900 | CATDPPLFW |
| 4A-67 | 431 | RTFSDDTMG | 1166 | AAINWSGDSTYYA | 1901 | CATDPPLFW |
| 4A-16 | 432 | RTFSDDTMG | 1167 | AAINWSGGTTRYA | 1902 | CATDPPLFW |
| 4A-11 | 433 | RTFSDDAMG | 1168 | AAIHWSGSSTRYA | 1903 | CATDPPLFW |
| 4A-68 | 434 | RTFSDDTMG | 1169 | GTINWSGGSTYYA | 1904 | CATDPPLFW |
| 4A-34 | 435 | RTFGDYIMG | 1170 | AAINWSGGYTPYA | 1905 | CATDPPLFW |
| 4A-28 | 436 | RTFGDDTMG | 1171 | AAINWNGGNTHYA | 1906 | CATDPPLFW |
| 4A-69 | 437 | RTFSDDAMG | 1172 | AAINWSGGTTRYA | 1907 | CATDPPLFW |
| 4A-7 | 438 | RTFGDYIMG | 1173 | AAINWSAGYTPYA | 1908 | CATDPPLFWGHVDLW |
| 4A-71 | 439 | RTFSDDTMG | 1174 | ASINWSGGSTYYA | 1909 | CATDPPLFW |
| 4A-23 | 440 | RTFSDDAMG | 1175 | AGISWNGGSIYYA | 1910 | CATDPPLFW |
| 4A-9 | 441 | FTFDDYEMG | 1176 | AAISWRGGTTYYA | 1911 | CAADRRGLASTRAGDYDW |
| 4A-72 | 442 | RTFGDDTMG | 1177 | AAINWSGGYTPYA | 1912 | CATDPPLFWGHVDLW |
| 4A-73 | 443 | RTFSDDAMG | 1178 | AAINWSGGSTRYA | 1913 | CATDPPLFW |
| 4A-29 | 444 | VTLDDYAMG | 1179 | AVINWSGGSTDYA | 1914 | CARGGGWVPSSTSESLNWYFD |
| | | | | | | RW |
| 4A-41 | 445 | RTFGDYIMG | 1180 | AAINWSGGTTPYA | 1915 | CATDPPLFCCHVDLW |
| 4A-74 | 446 | LTFSDDTMG | 1181 | AAVSWSGGNTYYA | 1916 | CATDPPLFW |
| 4A-75 | 447 | RTFGDDTMG | 1182 | AAINWTGGYTPYA | 1917 | CATDPPLFW |
| 4A-31 | 448 | RTFGDYIMG | 1183 | ATINWTAGYTYYA | 1918 | CATDPPLFCWHFDHW |
| 4A-32 | 449 | RTFGDDTMG | 1184 | AAINWSGGNTDYA | 1919 | CATDPPLFW |
| 4A-15 | 450 | RTFGDYTMG | 1185 | AAINWSGGNTYYA | 1920 | CATDPPLFW |
| 4A-14 | 451 | RTFSDDTMG | 1186 | AGINWSGNGVYYA | 1921 | CATDPPLFW |
| 4A-76 | 452 | RTFGDYAMG | 1187 | APINWSGGSTYYA | 1922 | CATDPPLFW |
| 4A-50 | 453 | GTFSNSGMG | 1188 | AVVNWSGRRTYYA | 1923 | CAVPWMDYNRRDW |
| 4A-17 | 454 | QLANFASYAMG | 1189 | AAITRSGSSTVYA | 1924 | CATTMNPNPRW |
| 4A-37 | 455 | RTFSDDIMG | 1190 | AAINWTGGSTYYA | 1925 | CATDPPLFW |
| 4A-44 | 456 | RTFGDYIMG | 1191 | AAINWSAGYTAYA | 1926 | CATARPNTGWHFDHW |
| 4A-77 | 457 | RTFSDDTMG | 1192 | GSINWSGGSTYYA | 1927 | CATDPPLFW |
| 4A-78 | 458 | RTFSDDTMG | 1193 | AGMTWSGSSTFYA | 1928 | CATDPPLFW |
| 4A-79 | 459 | RTFGDYIMG | 1194 | AAINWSGDYTDYA | 1929 | CATDPPLFW |
| 4A-8 | 460 | RTFGDYIMG | 1195 | GGINWSGGYTYYA | 1930 | CATDPPLFW |
| 4A-81 | 461 | RTFSDDTMG | 1196 | AAVNWSGGSTYYA | 1931 | CATDPPLFW |
| 4A-82 | 462 | RTFGDYAMG | 1197 | AAINWSGGYTRYA | 1932 | CATDPPLFW |
| 4A-83 | 463 | RTFGDDTMG | 1198 | AAINWSGGYTPYA | 1933 | CATDPPLFW |
| 4A-35 | 464 | RTFGDYIMG | 1199 | AAINWSAGYTAYA | 1934 | CARASPNTGWHFDRW |
| 4A-45 | 465 | RTFGDYIMG | 1200 | AAINWSGGYTHYA | 1935 | CATDPPLFW |
| 4A-84 | 466 | RTFSDDTMG | 1201 | AAITWSGGRTRYA | 1936 | CATDRPLFW |
| 4A-85 | 467 | RTFGDYIMG | 1202 | AAINWSGGYTAYA | 1937 | CATASPNTGWHFDHW |
| 4A-86 | 468 | RTFSDDTMG | 1203 | AAIHWSGSSTRYA | 1938 | CATDPPLFW |
| 4A-87 | 469 | RTFSDYTMG | 1204 | AAINWSGGTTYY | 1939 | CATDPPLFW |
| 4A-88 | 470 | RTFGDDTMG | 1205 | AAINWSGDNTHY | 1940 | CATDPPLFW |
| 4A-89 | 471 | FAFGDNWIG | 1206 | ASISSGGTTAYA | 1941 | CAHRGGWLRPWGYW |
| 4A-9 | 472 | RTFSDDAMG | 1207 | GRINWSGGNTYYA | 1942 | CATDPPLFW |
| 4A-91 | 473 | RTFSDDTMG | 1208 | GGISWSGGNTYYA | 1943 | CATDPPLFW |
| 4A-92 | 474 | RTFSDDTMG | 1209 | AAINWSGGSTYYA | 1944 | CATDPPLFW |
| 4A-46 | 475 | RTFGDDTMG | 1210 | AAINWSGGYTYYA | 1945 | CATDPPLFW |
| 4A-20 | 476 | RTFGDYIMG | 1211 | AAINWSADYTAYA | 1946 | CATDPPLFCWHFDHW |
| 4A-93 | 477 | RTFSDDAMG | 1212 | AAINWSGSSTYYA | 1947 | CATDPPLFW |
| 4A-4 | 478 | RTFGDYIMG | 1213 | AAINWIAGYTADA | 1948 | CAEPSPNTGWHFDHW |
| 4A-2 | 479 | RTFGDDTMG | 1214 | AAINWSGGNTPYA | 1949 | CATDPPLFW |
| 4A-94 | 480 | RTFSDDTMG | 1215 | AAINWSGDNTHYA | 1950 | CATDPPLFW |
| 4A-95 | 481 | RTFGDYIMG | 1216 | AAINWSAGYTAYA | 1951 | CATAPPLFCWHFDHW |
| 4A-12 | 482 | FTFGDYVMG | 1217 | AAINWNAGYTAYA | 1952 | CAKASPNTGWHFDHW |
| 4A-30 | 483 | RTFGDYTMG | 1218 | AAINWTGGYTYYA | 1953 | CATDPPLFW |
| 4A-27 | 484 | RTFGDYIMG | 1219 | AAINWSAGYTAYA | 1954 | CARATPNTGWHFDHW |
| 4A-22 | 485 | RTFGDYIMG | 1220 | AAINWSGDNTHYA | 1955 | CATDPPLFW |
| 4A-96 | 486 | RTFGDYIMG | 1221 | AAINWSAGYTPYA | 1956 | CATDPPLFCCHFDHW |
| 4A-97 | 487 | RTFGDYIMG | 1222 | AAINWSAGYTAYA | 1957 | CATAPPNTGWHFDHW |
| 4A-98 | 488 | FTWGDYTMG | 1223 | AAINWSGGNTYYAA | 1958 | CAADRRGLASTRAADYDW |
| 4A-99 | 489 | IPSTLRAMG | 1224 | AAVSSLGPFTRYA | 1959 | CAAKPGWVARDPSQYNW |
| 4A-100 | 490 | FSFDDDYVMG | 1225 | AAINWSGGSTYYA | 1960 | CAADRRGLASTRAADYDW |
| 4A-101 | 491 | RTFSNAAMG | 1226 | ARILWTGASRSYA | 1961 | CATTENPNPRW |
| 4A-102 | 492 | GTFGVYHMG | 1227 | AAINMSGDDSAYA | 1962 | CAILVGPGQVEFDHW |
| 4A-103 | 493 | FTFSSYYMG | 1228 | ARISGSTFYA | 1963 | CAALPFVCPSGSYSDYGDEYDW |
| 4A-104 | 494 | RTFSGDFMG | 1229 | GRINWSGGNTYYA | 1964 | CPTDPPLFW |
| 4A-105 | 495 | STLRDYAMG | 1230 | AAITWSGGSTAYA | 1965 | CASLLAGDRYFDYW |
| 4A-106 | 496 | FTFDDYTMG | 1231 | AAITDNGGSKYYA | 1966 | CAADRRGLASTRAADYDW |
| 4A-107 | 497 | GTFSSYGMG | 1232 | AAINWSGASTYYA | 1967 | CARDWRDRTWGNSLDYW |
| 4A-108 | 498 | FSFDDDYVMG | 1233 | AAISWSEDNTYYA | 1968 | CAADRRGLASTRAADYDW |
| 4A-109 | 499 | FSFDDDYVMG | 1234 | AAVSGSGDDTYYA | 1969 | CAADRRGLASTRAADYDW |
| 4A-110 | 500 | NIAAINVMG | 1235 | AAISASGRRTDYA | 1970 | CARRVYYYDSSGPPGVTFDIW |
| 4A-111 | 501 | IITSRYVMG | 1236 | AAISTGGSTIYA | 1971 | CARQDSSSPYFDYW |
| 4A-112 | 502 | FSFDDDYVMG | 1237 | AAISNSGLSTYYA | 1972 | CAADRRGLASTRAADYDW |
| 4A-113 | 503 | SISSINVMG | 1238 | ATMRWSTGSTYYA | 1973 | CAQRVRGFFGPLRTTPSWYEW |
| 4A-114 | 504 | LTFILYRMG | 1239 | AAINNFGTTKYA | 1974 | CARTHYDFWSGYTSRTPNYFD |
| | | | | | | YW |
| 4A-115 | 505 | GTFSVYHMG | 1240 | AAISWSGGSTAYA | 1975 | CAAVNTWTSPSFDSW |
| 4A-116 | 506 | RAFSTYGMG | 1241 | AGINWSGDTPYYA | 1976 | CAREVGPPPGYFDLW |
| 4A-117 | 507 | RTFSDIAMG | 1242 | ASINWGGGNTYYA | 1977 | CAAKGIWDYLGRRDFGDW |
| 4A-118 | 508 | RTFSSARMG | 1243 | AAISWSGDNTHYA | 1978 | CATTENPNPRW |
| 4A-119 | 509 | FAFSSYAMG | 1244 | ATINGDDYTYYA | 1979 | CVATPGGYGLW |
| 4A-120 | 510 | ITFRRHDMG | 1245 | AAIRWSSSSTVYA | 1980 | CAADRGVYGGRWYRTSQYTW |
| 4A-121 | 511 | TAASFNPMG | 1246 | AAITSGGSTNYA | 1981 | CAAIAYEEGVYRWDW |
| 4A-122 | 512 | NINIINYMG | 1247 | AAIHWNGDSTAYA | 1982 | CASGPPYSNYFAYW |
| 4A-123 | 513 | FTFDDYAMG | 1248 | AAISGSGGSTAYA | 1983 | CAKIMGSGRPYFDHW |
| 4A-124 | 514 | NIFTRNVMG | 1249 | AAITSSGSTNYA | 1984 | CARPSSDLQGGVDYW |
| 4A-125 | 515 | RTFSSIAMG | 1250 | ASINWGGGNTIYA | 1985 | CAAKGIWDYLGRRDFGDW |
| 4A-126 | 516 | IPSTLRAMG | 1251 | AAVSSLGPFTRYA | 1986 | CAAKPGWVARDPSEYNW |
| 4A-127 | 517 | FTLDDSAMG | 1252 | AAITNGGSTYYA | 1987 | CARFARGSPYFDFW |
| 4A-128 | 518 | SISSFNAMG | 1253 | AAIDWDGSTAYA | 1988 | CARGGGYYGSGSFEYW |
| 4A-129 | 519 | NIFSDNIIG | 1254 | AYYTSGGSIDYA | 1989 | CARGTAVGRPPPGGMDVW |
| 4A-130 | 520 | SISSIGAMG | 1255 | AAISSSGSSTVYA | 1990 | CARVPPGQAYFDSW |
| 4A-131 | 521 | FTFDDYGMG | 1256 | ATITWSGDSTYYA | 1991 | CAKGGSWYYDSSGYYGRW |
| 4A-132 | 522 | RTFSNYTMG | 1257 | SAISWSTGSTYYA | 1992 | CAADRYGPPWYDW |
| 4A-133 | 523 | STNYMG | 1258 | AAISMSGDDTIYA | 1993 | CARIGLRGRYFDLW |
| 4A-134 | 524 | GTFSSVGMG | 1259 | AVINWSGARTYYA | 1994 | CAVPWMDYNRRDW |
| 4A-135 | 525 | RIFTNTAMG | 1260 | AAINWSGGSTAYA | 1995 | CARTSGSYSFDYW |
| 4A-136 | 526 | EEFSDHWMG | 1261 | GAIHWSGGRTYYA | 1996 | CAADRRGLASTRAADYDW |
| 4A-137 | 527 | RTFSSIAMG | 1262 | AAINWSGARTAYA | 1997 | CAAKGIWDYLGRRDFGDW |
| 4A-138 | 528 | STSSLRTMG | 1263 | AAISSRDGSTIYA | 1998 | CARDDSSSPYFDYW |
| 4A-139 | 529 | GGTFGSYAMG | 1264 | AAISIASGASGGTT | 1999 | CATTMNPNPRW |
| | | | | NYA | | |
| 4A-140 | 530 | RTFSNAAMG | 1265 | ARITWNGGSTFYA | 2000 | CATTENPNPRW |
| 4A-141 | 531 | IILSDNAMG | 1266 | AAISWLGESTYYA | 2001 | CAADRRGLASTRAADYDW |
| 4A-142 | 532 | RTFGDYIMG | 1267 | AAINWNGGYTAYA | 2002 | CATTSPNTGWHYYRW |
| 4A-143 | 533 | FNFNWYPMG | 1268 | AAISWTGVSTYTAYA | 2003 | CARWGPGPAGGSPGLVGFDYA |
| 4A-144 | 534 | SIRSVSVMG | 1269 | AAISWSGVGTAYA | 2004 | CAAYQRGWGDW |
| 4A-145 | 535 | MTFRLYAMG | 1270 | GAINWLSESTYYA | 2005 | CAAKPGWVARDPSEYNW |
| 4A-146 | 536 | RTFSDDAMG | 1271 | AAINWSGGSTYYA | 2006 | CATDPPLFW |
| 4A-147 | 537 | GTFSVYAMG | 1272 | AAISMSGDDAAYA | 2007 | CAKISKDDGGKPRGAFFDSW |
| 4A-148 | 538 | FALGYYAMG | 1273 | AAISSRDGSTAYA | 2008 | CARLATGPQAYFHHW |
| 4A-149 | 539 | FNLDDYAMG | 1274 | AAISWDGGATAYA | 2009 | CARVGRGTTAFDSW |
| 4A-150 | 540 | NTFSGGFMG | 1275 | ASIRSGARTYYA | 2010 | CAQRVRGFFGPLRTTPSWYEW |
| 4A-151 | 541 | SIRSINIMG | 1276 | AAISWSGGSTVYA | 2011 | CASLLAGDRYFDYW |
| 5A-1 | 542 | GTFSSIGMG | 1277 | AAISWDGGATAYA | 2012 | CAKEDVGKPFDW |
| 5A-2 | 543 | LRFDDYAMG | 1278 | AIKFSGGTTDYA | 2013 | CASWDGLIGLDAYEYDW |
| 5A-3 | 544 | SIFSIDVMG | 1279 | AGISWSGDSTLYA | 2014 | CAAFDGYTGSDW |
| 5A-4 | 545 | FTLADYAMG | 1280 | AVITCSGGSTDYA | 2015 | CAADDCYIGCGW |
| 5A-5 | 546 | RTFSSIAMG | 1281 | AEITEGGISPSGDN | 2016 | CAAELHSSDYTSPGAESDYGW |
| | | | | IYYA | | |
| 5A-6 | 547 | PTFSSYAMMG | 1282 | AAINNFGTTKYA | 2017 | CAASASDYGLGLELFHDEYNW |
| 5A-7 | 548 | STGYMG | 1283 | AAIHSGGSTNYA | 2018 | CATVATALIW |
| 5A-8 | 549 | RPFSEYTMG | 1284 | SSIHWGGRGTNYA | 2019 | CAAELHSSDYTSPGAYAW |
| 5A-9 | 550 | LTLSTYGMG | 1285 | AHIPRSTYSPYYA | 2020 | CAAIGDGAVW |
| 5A-10 | 551 | FTFNNHNMG | 1286 | AAISSYSHTAYA | 2021 | CALQPFGASNYRW |
| 5A-11 | 552 | GIYRVMG | 1287 | ASISSGGGINYA | 2022 | CAAESWGRQW |
| 5A-12 | 553 | YTDSNLWMG | 1288 | AINRSTGSTSYA | 2023 | CATSGSGSPNW |
| 5A-13 | 554 | FTFDYYTMG | 1289 | AAIRSSGGLFYA | 2024 | CAAYLDGYSGSW |
| 5A-14 | 555 | GIFSINVMG | 1290 | SAIRWNGGNTAYA | 2025 | CAGFDGYTGSDW |
| 5A-15 | 556 | FTFDGAAMG | 1291 | ATIRWTNSTDYA | 2026 | CARGRYGIVERW |
| 5A-16 | 557 | RTHSIYPMG | 1292 | AAIHSGGATVYA | 2027 | CAARRWIPPGPIW |
| 5A-17 | 558 | PTFSIYAMG | 1293 | AGIRWSDVYTQYA | 2028 | CALDIDYRDW |
| 5A-18 | 559 | LTFDDNIHVMG | 1294 | AAIHWSGGSTIYA | 2029 | CAADVYPQDYGLGYVEGKMY |
| | | | | | | YGMDW |
| 5A-19 | 560 | LTLDYYAMG | 1295 | ASINWSGGSTYYA | 2030 | CAAYGSGEFDW |
| 5A-20 | 561 | RTIVPYTMG | 1296 | AAISPSAFTEYA | 2031 | CAARRWGYDW |
| 5A-21 | 562 | GTFTTYHMG | 1297 | AHISTGGATNYA | 2032 | CATFPAIVTDSDYDLGNDW |
| 5A-22 | 563 | FTFNVFAMG | 1298 | AAINWSDSRTDYA | 2033 | CASGSDNRARELSRYEYVW |
| 5A-23 | 564 | SIFSIDVMG | 1299 | AAISWSGESTLYA | 2034 | CAAFDGYSGSDW |
| 5A-24 | 565 | FTFSSYSMG | 1300 | AAISSYSHTAYA | 2035 | CALQPFGASSYRW |
| 5A-25 | 566 | NTFSINVMG | 1301 | AAIHWSGDSTLYA | 2036 | CAAFDGYSGNHW |
| 5A-26 | 567 | RTISSYIMG | 1302 | ARIYTGGDTIYA | 2037 | CAARTSYNGRYDY1DDYSW |
| 5A-27 | 568 | RANSINWMG | 1303 | ATITPGGNTNYA | 2038 | CAAAAGSTWYGTLYEYDW |
| 5A-28 | 569 | GTFSVFAMG | 1304 | AEITAGGSTYYA | 2039 | CAVDGPFGW |
| 5A-29 | 570 | FTFDDYPMG | 1305 | ASVLRGGYTWYA | 2040 | CAKDWATGLAW |
| 5A-30 | 571 | FALGYYAMG | 1306 | AGIRWTDAYTEYA | 2041 | CAADVSPSYGSRWYW |
| 5A-31 | 572 | RTLDIHVMG | 1307 | AVINWTGESTLYA | 2042 | CAAFDGYTGNYW |
| 5A-32 | 573 | FTPDNYAMG | 1308 | AALGWSGVTTYH | 2043 | CASDESDAANW |
| | | | | YYA | | |
| 5A-33 | 574 | FTFDDYAMG | 1309 | ATIMWSGNTTYYA | 2044 | CATNDDDV |
| 5A-34 | 575 | RTFSRYIMG | 1310 | AAISWSGGDNTYYA | 2045 | CAAYRIVVGGTSPGDWRW |
| 5A-35 | 576 | PTFSIYAMG | 1311 | AGISWNGGSTNYA | 2046 | CALRRRFGGQEW |
| 5A-36 | 577 | RTFSLNAMG | 1312 | AAISCGGGSTYA | 2047 | CAADNDMGYCSW |
| 5A-37 | 578 | STFSINAMG | 1313 | GGISRSGATTNYA | 2048 | CAADGVPEYSDYASGPVW |
| 5A-38 | 579 | RTFSMHAMG | 1314 | ASISSQGRTNYA | 2049 | CAAEVRNGSDYLPIDW |
| 5A-39 | 580 | VTLDLYAMG | 1315 | AGIRWTDAYTEYA | 2050 | CAVDIDYRDW |
| 5A-40 | 581 | LPFTINVMG | 1316 | AAIHWSGLTTFYA | 2051 | CAELDGYFFAHW |
| 5A-41 | 582 | RAFSNYAMG | 1317 | AWINNRGTTDYA | 2052 | CASTDDYGVDW |
| | | | | DSGSTYYA | | |
| 5A-42 | 583 | FTPDDYAMG | 1318 | ASIGYSGRSNSYN | 2053 | CAIAHGSSTYNW |
| | | | | YYA | | |
| 5A-43 | 584 | FTLNYYGMG | 1319 | AAITSGGAPHYA | 2054 | CASAYDRGIGYDW |
| 5A-44 | 585 | LPFSTKSMG | 1320 | AAIHWSGLTSYA | 2055 | CAADRAADFFAQRDEYDW |
| 5A-45 | 586 | RTFSINAMG | 1321 | AAISWSGESTQYA | 2056 | CAAFDGGSGTQW |
| 5A-46 | 587 | EEFSDHWMG | 1322 | AAIHWSGDSTHRN | 2057 | CATVGITLNW |
| | | | | YA | | |
| 5A-47 | 588 | FTFGSYDMG | 1323 | TAINWSGARTAYA | 2058 | CAARSVYSYEYNW |
| 5A-48 | 589 | LPLDLYAMG | 1324 | AGIRWSDAYTEYA | 2059 | CALDIDYRHW |
| 5A-49 | 590 | RTSTVNGMG | 1325 | ASISQSGAATAYA | 2060 | CAADRTYSYSSTGYYW |
| 5A-50 | 591 | FSLDYYGMG | 1326 | AAITSGGTPHYA | 2061 | CASAYNPGIGYDW |
| 5A-51 | 592 | RPNSINWMG | 1327 | ATITPGGNTNYA | 2062 | CAAAAGTTWYGTLYEYDW |
| 5A-52 | 593 | EKFSDHWMG | 1328 | ATITFSGARTAYA | 2063 | CAALIKPSSTDRIFEEW |
| 5A-53 | 594 | LTVVPYAMG | 1329 | AAIRRSAVTNYA | 2064 | CAARRWGYHYW |
| 5A-54 | 595 | TTFNFNVMG | 1330 | AVISWTGESTLYA | 2065 | CAAFDGYTGRDW |
| 5A-55 | 596 | IDVNRNAMG | 1331 | AAITWSGGWRYYA | 2066 | CATTFGDAGIPDQYDFGW |
| 5A-56 | 597 | RTFSSNMG | 1332 | ARIFGGDRTLYA | 2067 | CADINGDW |
| 5A-57 | 598 | GTFSMGWIR | 1333 | GCIGWITYYA | 2068 | CAPFGW |
| 5A-58 | 599 | CTLDYYAMG | 1334 | AGIRWTDAYTEYA | 2069 | CAADVSPSYGGRWYW |
| 5A-59 | 600 | LTFSLYRMC | 1335 | SCISNIDGSTYYA | 2070 | CAADLLGDSDYEPSSGFGW |
| 5A-60 | 601 | RSFSSHRMG | 1336 | AAIMWSGSHRNYA | 2071 | CAAIAYEEGVYRWDW |
| 5A-61 | 602 | RIIVPNTMG | 1337 | TGISPSAFTEYA | 2072 | CAAHGWGCHW |
| 5A-62 | 603 | SIFIISMG | 1338 | TGINWSGGSTTYA | 2073 | CAASAIGSGALRRFEYDW |
| 5A-63 | 604 | FSLDYYDMG | 1339 | AALGWSGGSTDYA | 2074 | CAAGNGGRYGIVERW |
| 5A-64 | 605 | TSISNRVMG | 1340 | ARIYTGGDTLYA | 2075 | CAARKIYRSLSYYGDYDW |
| 5A-65 | 606 | NIDRLYAMG | 1341 | AAIDSDGSTDYA | 2076 | CAALIDYGLGFPIEW |
| 5A-66 | 607 | NTFTINVMG | 1342 | AAINWNGGTTLYA | 2077 | CAAFDGYSGIDW |
| 5A-67 | 608 | FNVNDYAMG | 1343 | AGITSSVGVTNYA | 2078 | CAADIFFVNW |
| 5A-68 | 609 | FTFDHYTMG | 1344 | AAISGSENVTSYA | 2079 | CAAEPYIPVRTMRHMTFLTW |
| 6A-1 | 610 | RTFGNYNMG | 1345 | ATINSLGGTSYA | 2080 | CARVDYYMDVW |
| 6A-2 | 611 | FTMSSSWMG | 1346 | TVISGVGTSYA | 2081 | CARGPDSSGYGFDYW |
| 6A-3 | 612 | FTFSPSWMG | 1347 | ATINEYGGRNYA | 2082 | CARVDRDFDYW |
| 6A-4 | 613 | FTRDYYTMG | 1348 | AAISRSGSLTSYA | 2083 | CANLAYYDSSGYYDYW |
| 6A-5 | 614 | RTFTMG | 1349 | ASTNSAGSTNYA | 2084 | CTTVDQYFDYW |
| 6A-6 | 615 | TTLDYYAMG | 1350 | AAISWSGGSTAYA | 2085 | CAREDYYDSSGYSW |
| 6A-7 | 616 | FTFSSYWMG | 1351 | ATINWSGVTAYA | 2086 | CARADDYFDYW |
| 6A-8 | 617 | FTLSGIWMG | 1352 | AIITTGGRTTYA | 2087 | CAGYSTFGSSSAYYYYSMDVG |
| 6A-9 | 618 | FTFDYYAMG | 1353 | SAIDSEGRTSYA | 2088 | CARWGPFDIW |
| 6A-10 | 619 | SIASIHAMG | 1354 | AAISRSGGFGSYA | 2089 | CARDDKYYDSSGYPAYFQHW |
| 6A-11 | 620 | LAFNAYAMG | 1355 | ATIGWSGANTYYA | 2090 | CASDPPGW |
| 6A-12 | 621 | STYTTYSMG | 1356 | AAISGSENVTSYA | 2091 | CARVDDYMDVW |
| 6A-13 | 622 | LTFNDYAMG | 1357 | AHIPRSTYSPYYA | 2092 | CAFLVGPQGVDHGAFDVW |
| 6A-14 | 623 | ITFRFKAMG | 1358 | AAVSWDGRNTYYA | 2093 | CASDYYYMDVW |
| 6A-15 | 624 | STVLINAMG | 1359 | AAVRWSDDYTYYA | 2094 | CAKEGRAGSLDYW |
| 6A-16 | 625 | FTFDDAAMG | 1360 | AHISWSGGSTYYA | 2095 | CATFGATVTATNDAFDIW |
| 6A-17 | 626 | NTGSTGYMG | 1361 | AGVINDGSTVYA | 2096 | CARLATSHQDGTGYLFDYW |
| 6A-18 | 627 | LTFRNYAMG | 1362 | AGMMWSGGTTTYA | 2097 | CAREGYYYDSSGYLNYFDYW |
| 6A-19 | 628 | SILSIAVMG | 1363 | AAISPSAVTTYYA | 2098 | CAIGYYDSSGYFDYW |
| 6A-20 | 629 | STLPYHAMG | 1364 | AAITWNGASTSYA | 2099 | CARDRYYDTSASYFESETW |
| 6A-21 | 630 | TLFKINAMG | 1365 | AAITSSGSNIDYTYYA | 2100 | CARSNTGWYSFDYW |
| 6A-22 | 631 | RTFSEVVMG | 1366 | ATIHSSGSTSYA | 2101 | CVRVTSDYSMDSW |
| 6A-23 | 632 | SIFSMNTMG | 1367 | ALINRSGGGINYA | 2102 | CVRLSSGYYDFDYW |
| 6A-24 | 633 | FTLDYYAMG | 1368 | AAINWSGDNTHYA | 2103 | CARAPFYCTTTKCQDNYYYM |
| | | | | | | DVW |
| 6A-25 | 634 | LTFGTYTMG | 1369 | AAISRFGSTYYA | 2104 | CARGGDYDFWSVDYMDVW |
| 6A-26 | 635 | DTFSTSWMG | 1370 | ATINTGGGTNYA | 2105 | CARVTTSFDYW |
| 6A-27 | 636 | ITFRFKAMG | 1371 | ASISRSGTTYYA | 2106 | CATDYSAFDMW |
| 6A-28 | 637 | DTYGSYWMG | 1372 | ATITSDDRTNYA | 2107 | CARVTSSLSGMDVW |
| 6A-29 | 638 | YTLKNYYAMG | 1373 | AAIIWTGESTLDA | 2108 | CAREGYYDSSGYYW |
| 6A-30 | 639 | FAFGDSWMG | 1374 | ATINWSGVTAYA | 2109 | CARADGYFDYW |
| 6A-31 | 640 | DTFSANRMG | 1375 | ASITWSSANTYYA | 2110 | CATFNWNDEGFDFW |
| 6A-32 | 641 | FTLDYYDMG | 1376 | ALISWSGGSTYYA | 2111 | CATDFYGWGTRERDAFDIW |
| 6A-33 | 642 | TFQRINHMG | 1377 | ATINTGGQPNYA | 2112 | CASLIAAQDYYFDYW |
| 6A-34 | 643 | SAFRSNAMG | 1378 | AHISWSSKSTYYA | 2113 | CATYCSSTSCFDYW |
| 6A-35 | 644 | FTLAYYAMG | 1379 | AAISMSGDDTIYA | 2114 | CARELGYSSTVWPW |
| 6A-36 | 645 | FDFSVSWMG | 1380 | TAITWSGDSTNYA | 2115 | CASLLHTGPSGGNYFDYW |
| 6A-37 | 646 | HTFSTSWMG | 1381 | ATINSLGGTNYA | 2116 | CARVSSGDYGMDVW |
| 6A-38 | 647 | NTFSGGFMG | 1382 | AVISSLSSKSYA | 2117 | CAKVDSGYDYW |
| 6A-39 | 648 | FTFSPSWMG | 1383 | AAISWSGGSTAYA | 2118 | CHGLGEGDPYGDYEGYFDLW |
| 6A-40 | 649 | FTFSDYWMG | 1384 | ARVWWNGGSAYYA | 2119 | CAREVLRQQVVLDYW |
| 6A-41 | 650 | FTFSTSWMG | 1385 | ASINEYGGRNYA | 2120 | CAGLHYYYDSSGYNPTEYYG |
| | | | | | | MDVW |
| 6A-42 | 651 | DTYGSYWMG | 1386 | AVITSGGSTNYA | 2121 | CTHVQNSYYYAMDVW |
| 6A-43 | 652 | RTFSSYAMMG | 1387 | ASVNWDASQINYA | 2122 | CTTLGAVYFDSSGYHDYFDYW |
| 6A-44 | 653 | GTFGVYHMG | 1388 | GRITWTDGSTYYA | 2123 | CFGLLEVYDMTFDYW |
| 6A-45 | 654 | NMFSINAMG | 1389 | TLISWSSGRTSYA | 2124 | CASLGYCSGGSCFDYW |
| 6A-46 | 655 | LTFSAMG | 1390 | ALIRRDGSTIYA | 2125 | CAALGILFGYDAFDIW |
| 6A-47 | 656 | RTFSMHAMG | 1391 | ASITYGGNINYA | 2126 | CAKEGYYDSTGYRTYFQQW |
| 6A-48 | 657 | FTVSNYAMG | 1392 | ASVNWSGGITSYA | 2127 | CATTGTVTLGYW |
| 6A-49 | 658 | STVLINAMG | 1393 | AAISWSPGRTDYA | 2128 | CARDCSGGSCYSGDYW |
| 6A-50 | 659 | FSFDRWAMG | 1394 | ASLATGGNTNYA | 2129 | CARVTNYDAFDIW |
| 6A-51 | 660 | YTYSSYVMG | 1395 | AAISRFGSTYYA | 2130 | CARDSGEHFWDSGYIDHW |
| 6A-52 | 661 | DTYGSYWMG | 1396 | AAITSGGSTVYA | 2131 | CARVDSRFDYW |
| 6A-53 | 662 | ISINTNVMG | 1397 | AAISTGSVTIYA | 2132 | CARVDDFGYFDLW |
| 6A-54 | 663 | FEFENHWMG | 1398 | AHITAGGLSNYA | 2133 | CGRHWGIYDSSGFSSFDYW |
| 6A-55 | 664 | FTMSSSWMG | 1399 | ARITSGGSTGYA | 2134 | CASVDGYFDYW |
| 6A-56 | 665 | NIFRSNMG | 1400 | AGITWNGDTTYYA | 2135 | CARALGVTYQFDYW |
| 6A-57 | 666 | LTFDDHSMG | 1401 | AAVPLSGNTYYA | 2136 | CASFSGGPADFDYW |
| 6A-58 | 667 | RAVSTYAMG | 1402 | AAISGSENVTSYA | 2137 | CLSVTGDTEDYGVFDTW |
| 6A-59 | 668 | ISGSVFSRTPMG | 1403 | SSIYSDGSNTYYA | 2138 | CAHWSWELGDWFDPW |
| 6A-60 | 669 | DTYGSYWMG | 1404 | ATISQSGAATAYA | 2139 | CAGLLRYSGTYYDAFDVW |
| 6A-61 | 670 | DTYGSYWMG | 1405 | AAINWSGGSTNYA | 2140 | CAGLGWNYMDYW |
| 6A-62 | 671 | STFSGNWMG | 1406 | AVISWTGGSTYYA | 2141 | CATHNSLSGFDYW |
| 6A-63 | 672 | QTFNMG | 1407 | AAIGSGGSTSYA | 2142 | CWRLGNDYFDYW |
| 6A-64 | 673 | IPSIHAMG | 1408 | AAINWSHGVTYYA | 2143 | CGGGYGYHFDYW |
| 6A-65 | 674 | LPFSTLHMG | 1409 | ASLSIFGATGYA | 2144 | CWMYYYDSSGYYGNYYYGMDVW |
| 6A-66 | 675 | LTFSLFAMG | 1410 | AAISSGGSTDYA | 2145 | CARGNTKYYYDSSGYSSAFDYW |
| 6A-67 | 676 | SFSNYAMG | 1411 | AAISSSGALTSYA | 2146 | CWIVGPGPLDGMDVW |
| 6A-68 | 677 | FTLSDRAMG | 1412 | AHITAGGLSNYA | 2147 | CVHLASQTGAGYFDLW |
| 6A-69 | 678 | GTFSSVGMG | 1413 | AGISRSGGTYYA | 2148 | CARYDFWSGYPYW |
| 6A-70 | 679 | FNLDDYADMG | 1414 | AAIGWGGGSTRYA | 2149 | CAREILWFGEFGEPNVW |
| 6A-71 | 680 | ITFSNDAMG | 1415 | AIITSSDTNDTTNYA | 2150 | CARLHYYDSSGYFDYW |
| 6A-72 | 681 | STLSINAMG | 1416 | AAIDWSGGSTAYA | 2151 | CARDSSATRTGPDYW |
| 6A-73 | 682 | HTFSGYAMG | 1417 | AVITREGSTYYA | 2152 | CARLGGEGFDYW |
| 6A-74 | 683 | FAFGDSWMG | 1418 | AAITSGGSTDYA | 2153 | CARGLLWFGELFGYW |
| 6A-75 | 684 | GTFSTYWMG | 1419 | AAISRSGGNTYYA | 2154 | CVRHSGTDGDSSFDYW |
| 6A-76 | 685 | LAFDFDGMG | 1420 | AAINSGGSTYYA | 2155 | CARFFRAHDYW |
| 6A-77 | 686 | FTFDRSWMG | 1421 | AAVTEGGTTSYA | 2156 | CARADYDFDYW |
| 6A-78 | 687 | RTYDAMG | 1422 | ASVTSGGYTHYA | 2157 | CAKFGRKIVGATELDYW |
| 6A-79 | 688 | SISSIDYMG | 1423 | SWISSSDGSTYYA | 2158 | CARSPSFSQIYYYYYMDVW |
| 6A-80 | 689 | GTFSFYNMG | 1424 | AFISGNGGTSYA | 2159 | CAVVAMRMVTTEGPDVLDVW |
| 6A-81 | 690 | FIGNYHAMG | 1425 | AAVTWSGGTTNYA | 2160 | CAREGYYYDSSGYPYYFDYW |
| 6A-82 | 691 | SSLDAYGMG | 1426 | AAISWGGGSIYYA | 2161 | CARLSQGMVALDYW |
| 6A-83 | 692 | SIASIHAMG | 1427 | AAITWSGAITSYA | 2162 | CAKDGGYGELHYGMEVW |
| 6A-84 | 693 | FTPDDYAMG | 1428 | AAINSGGSYTYYA | 2163 | CARDRGPW |
| 6A-85 | 694 | GTFSVFAMG | 1429 | SAINWSGGSLLYA | 2164 | CALFGDFDYW |
| 6A-86 | 695 | PISGINRMG | 1430 | AVITSNGRPSYA | 2165 | CVRLSSGYFDFDYW |
| 6A-87 | 696 | TSIMVGAMG | 1431 | AIIRGDGRTSYA | 2166 | CARFAGWDAFDIW |
| 6A-88 | 697 | RTFSTHWMG | 1432 | AVINWSGGSIYYA | 2167 | CARLSSDGYNYFDFW |
| 6A-89 | 698 | TIFASAMG | 1433 | AVVNWNGSSTVYA | 2168 | CTTVDQYFNYW |
| 6A-90 | 699 | FPFSIWPMG | 1434 | AAVRWSSTYYA | 2169 | CATGECDGGSCSLAYW |
| 6A-91 | 700 | RTFGNYAMG | 1435 | ASISSSGVSKHYA | 2170 | CVRFGSSWARDLDQW |
| 6A-92 | 701 | FLFDSYASMG | 1436 | ATIWRRGNTYYA | 2171 | CTETGTAAW |
| | | | | NYA | | |
| 6A-93 | 702 | LPFSTKSMG | 1437 | AAISMSGLTSYA | 2172 | CLKVLGGDYEADNWFDYW |
| 6A-94 | 703 | NIFRIETMG | 1438 | AGIIRSGGETLYA | 2173 | CARSLYYDRSGSYYFDYW |
| 6A-95 | 704 | IPSSIRAMG | 1439 | AV1RWTGGSTYYA | 2174 | CARDIGYYDSSGYYNDGGFDYW |
| 6A-96 | 705 | FTLSGNWMG | 1440 | AIITSGGRTNYA | 2175 | CAGHATFGGSSSSYYYGMDVW |
| 6A-97 | 706 | FTFSSLAMG | 1441 | AAITWSGDITNYA | 2176 | CLRLSSSGFDHW |
| 6A-98 | 707 | TFGHYAMG | 1442 | AAINWSSRSTVYA | 2177 | CAKSDGLMGELRSASAFDIW |
| 6A-99 | 708 | IPFRSRTMG | 1443 | AGISRSGASTAYA | 2178 | CTHANDYGDYW |
| 6A-100 | 709 | GTFSTSWMG | 1444 | AHITAGGLSNYA | 2179 | CARLLVREDWYFDLW |
| 6A-101 | 710 | GTFSLFAMG | 1445 | AAISWTGDSTYYK | 2180 | CAYNNSSGEYW |
| | | | | YYA | | |
| 6A-102 | 711 | SSFSAYAMG | 1446 | SAIDSEGTTTYA | 2181 | CAGDYNFWSGFDHW |
| 6A-103 | 712 | RTSSPIAMG | 1447 | AVRWSDDYTYYA | 2182 | CAKKLGGYYAFDIW |
| 6A-104 | 713 | LTFNQYTMG | 1448 | ASITDGGSTYYA | 2183 | CARDSRYMDVW |
| 6A-105 | 714 | PTFSSMG | 1449 | AAISWDGGATAYA | 2184 | CAIEIVVGGIYW |
| 6A-106 | 715 | IPSTLRAMG | 1450 | AATSWSGGSKYYA | 2185 | CATDLYYMDVW |
| 6A-107 | 716 | GVGFSVTNMG | 1451 | AVISSSSSTNYA | 2186 | CTTFNWNDEGFDYW |
| 6A-108 | 717 | GTFGSYGMG | 1452 | AAIRWSGGITYYA | 2187 | CARERYWNPLPYYYYGMDVW |
| 6A-109 | 718 | GTFSTYAMG | 1453 | ASIDWSGLTSYA | 2188 | CARGPFYMYCSGTKCYSTNW |
| | | | | | | FDPW |
| 6A-110 | 719 | PIYAVNRMG | 1454 | AGIWRSGGHRDYA | 2189 | CARGEIDILTGYWYDYW |
| 6A-111 | 720 | FTFSNYWMG | 1455 | GGISRSGVSTSYA | 2190 | CTTLLYYYDSSGYSFDAFDIW |
| 6A-112 | 721 | GTFSAYHMG | 1456 | TIIDNGGPTSYA | 2191 | CTALLYYFDNSGYNFDPFDIW |
| 9A-1 | 722 | RTFSRLAMG | 1457 | AAISRSGRSTSYA | 2192 | CAARRSQILFTSRTDYEW |
| 9A-2 | 723 | SFSIAAMG | 1458 | ATINYSGGGTYYA | 2193 | CAAVN1FDESAYAAFACYDVVW |
| 9A-3 | 724 | RTFSRYAMG | 1459 | AAISRSGKSTYYA | 2194 | CAASSVFSDLRYRKNPKW |
| 9A-4 | 725 | RTFSKYAMG | 1460 | ALITPSSRTTYYA | 2195 | CAIAGRGRW |
| 9A-5 | 726 | RTFRRYAMG | 1461 | ASINWGGGNTYYA | 2196 | CAKTKRTGIFTTARMVDW |
| 9A-6 | 727 | RTFSRFAMG | 1462 | AAIRWSGGRTVYA | 2197 | CAIEPGTIRNWRNRVPFARGNF |
| | | | | | | GW |
| 9A-7 | 728 | LGIAFSRRTAMG | 1463 | AAISWRGGNTYYA | 2198 | CAARRWIPPGPIW |
| 9A-8 | 729 | RTFRRYPMG | 1464 | AAISRSGGSTYYA | 2199 | CAAKRLRSFASGGSYDW |
| 9A-9 | 730 | GTLRGYGMG | 1465 | ASISRSGGSTYYA | 2200 | CAARRRVTLFTSRADYDW |
| 9A-10 | 731 | RMFSSRSMG | 1466 | ALINRSGGSQFYA | 2201 | CAARRWIPPGPIW |
| 9A-11 | 732 | RTFGRRAMG | 1467 | AGISRGGGTNYA | 2202 | CAAKGIWDYLGRRDFGDW |
| 10A-1 | 733 | LSSPPFDDFPMG | 1468 | SSIYSDDGDSMYA | 2203 | CARQTFDFWSASLGGNFWYFDLW |
| 10A-2 | 734 | GTFSSYSMG | 1469 | SAISWIIGSGGTTNYA | 2204 | CTAGAGDSW |
| 10A-3 | 735 | SIFSTRTMG | 1470 | ASITKFGSTNYA | 2205 | CTRGGGRFFDWLYLRW |
| 10A-4 | 736 | RTLWRSNMG | 1471 | ASISSFGSTKYA | 2206 | CARGHGRYFDWLLFARPPDYW |
| 10A-5 | 737 | RSLGIYRMG | 1472 | AAITSGGRKNYA | 2207 | CAKRTIFGVGRWLDPW |
| 10A-6 | 738 | TTLTFRIMG | 1473 | PAISSTGLASYT | 2208 | CSKDRAPNCFACCPNGFDVW |
| 10A-7 | 739 | SRFSGRFNILNMG | 1474 | ARIGYSGQSISYA | 2209 | CARGRFLGGTEW |
| 10A-8 | 740 | TLFKINAMG | 1475 | AQINRHGVTYYA | 2210 | CARGRTIFFGGGRYFDYW |
| 10A-9 | 741 | IPFRSRTMG | 1476 | AGITGSGRSQYYA | 2211 | CARGARIFGSVAPWRGGNYY |
| | | | | | | GMDVW |
| 10A-10 | 742 | FTFSSFRMG | 1477 | AGISRGGSTNYA | 2212 | CARASGLWFRRPHVW |
| 10A-11 | 743 | RNFRRNSMG | 1478 | AGISWSGARTHYA | 2213 | CARVSRRPRSPPGYYYGMDVW |
| 10A-12 | 744 | RNLRMYRMG | 1479 | ATIRWSDGSTYYA | 2214 | CTRARLRYFDWLFPTNFDYW |
| 10A-13 | 745 | GLTFSSNTMG | 1480 | ASISSSGRTSYA | 2215 | CARRVRRLWFRSYFDLW |
| 10A-14 | 746 | FTLAYYAMG | 1481 | AAISWSGRNINYA | 2216 | CARERARWFGKFSVSW |
| 10A-15 | 747 | RTFSSFPMG | 1482 | AAISWSGSTSYA | 2217 | SACGRLGFGAW |
| 10A-16 | 748 | ISSSKRNMG | 1483 | ATWTSRGITTYA | 2218 | CARGGPPRLWGSYRRKYFDYW |
| 10A-17 | 749 | RTFSIYAMG | 1484 | ARITRGGITKYA | 2219 | CARGLGWLLGYYW |
| 10A-18 | 750 | RMYNSYSMG | 1485 | ARISPGGTFYA | 2220 | CTTSARSGWFWRYFDSW |
| 10A-19 | 751 | RTFRSYGMG | 1486 | ASISRSGTTMYA | 2221 | CARRGLLQWFGAPNSWFDPW |
| 10A-20 | 752 | RTIRTMG | 1487 | ATINSRGITNYA | 2222 | CTTERDGLLWFRELFRPSW |
| 10A-21 | 753 | RSFSFNAMG | 1488 | ARISRFGRTNYA | 2223 | CAKVHSYVWGGHSDYW |
| 10A-22 | 754 | RTYYAMG | 1489 | GAIDWSGRRITYA | 2224 | CARVRFSRLGGVIGRPIDSW |
| 10A-23 | 755 | RAFRRYTMG | 1490 | ASITKFGSTNYA | 2225 | CAKDRGVLWFGELWYW |
| 10A-24 | 756 | RTFSNYRMG | 1491 | ASINRGGSTKYA | 2226 | CASGKGGSATIFHLSRRPLYFD |
| | | | | | | YW |
| 10A-25 | 757 | ITFSPYAMG | 1492 | ATINWSGGYTVYA | 2227 | CAKRKNRGPLWFGGGGWGYW |
| 10A-26 | 758 | RTFSGFTMSST | 1493 | AGIITNGSTNYA | 2228 | CARRVAYSSFWSGLRKHMDV |
| | | WMG | | | | W |
| 10A-27 | 759 | RTFRRYSMG | 1494 | ASITPGGNTNYA | 2229 | CASRRRWLTPYIFW |
| 10A-28 | 760 | SIFSIGMG | 1495 | ARIWWRSGATYYA | 2230 | CAAISIFGRLKW |
| 10A-29 | 761 | RTFTSYRMG | 1496 | AEISSSGGYTYYA | 2231 | CARVGPLRFLAQRPRLRPDYW |
| 10A-30 | 762 | RTFSSFRFRAMG | 1497 | ALIFSGGSTYYA | 2232 | CAREWGRWLQRGSYW |
| 10A-31 | 763 | RTFGSYGMG | 1498 | ATISIGGRTYYA | 2233 | CARGSGSGFMWYHGNNNYDR |
| | | | | | | WRYW |
| 10A-32 | 764 | RTFRSYPMG | 1499 | ASINRGGSTNYA | 2234 | CARGRYDFWSGYYRWFDPW |
| 10A-33 | 765 | RTFSRSDMG | 1500 | AAISWSGGSTSYA | 2235 | CATVPPPRRFLEWLPRRLTYIW |
| 10A-34 | 766 | RTFRRYTMG | 1501 | ASMRGSRSYYA | 2236 | CARMSGFPFLDYW |
| 10A-35 | 767 | SIFRLSTMG | 1502 | ASISSFGSTYYA | 2237 | CARTRGIFLWFGESFDYW |
| 10A-36 | 768 | IAFRIRTMG | 1503 | ASITSGGSTNYA | 2238 | CARGGPRFGGFRGYFDPW |
| 10A-37 | 769 | FTFTSYRMG | 1504 | AGISRFFGTAYYA | 2239 | CARVTRWFGGLDVW |
| 10A-38 | 770 | RTFSRYVMG | 1505 | ASISRFGRTNYA | 2240 | CARHHGLGILWWGTMDVW |
| 10A-39 | 771 | RTFSMG | 1506 | ASISRFGRTNYA | 2241 | CAKRSTWLPQHFDSW |
| 10A-40 | 772 | RTFSTYTMG | 1507 | ARIWRSGGNTYYA | 2242 | CARGVRGVFRAYFDHW |
| 10A-41 | 773 | RNLRMYRMG | 1508 | ALISRVGVTSYA | 2243 | CARGTSFFNFWSGSLGRVGFD |
| | | | | | | SW |
| 10A-42 | 774 | ITIRTHAMG | 1509 | ATISRSGGNTYYA | 2244 | CTTAGVLRYFDWFRRPYW |
| 10A-43 | 775 | RTFRRYHMG | 1510 | AAITSGGRTNYA | 2245 | CTTDGLRYFDWFPWASAFDIW |
| 10A-44 | 776 | RTFRRYTMG | 1511 | AVISWSGGSTKYA | 2246 | CARKGRWSGMNVW |
| 10A-45 | 777 | RTFSWYPMG | 1512 | ASISWGGARTYYA | 2247 | CARSTGPRGSGRYRAHWFDSW |
| 10A-46 | 778 | RTFTSYRMG | 1513 | AAITWNSGRTRYA | 2248 | CSPSSWPFYFGAW |
| 10A-47 | 779 | RPLRRYVMG | 1514 | AAITNGGSTKYA | 2249 | CARGTPWRLLWFGTLGPPPAF |
| | | | | | | DYW |
| 10A-48 | 780 | RTFRRYAMG | 1515 | AAINRSGSTEYA | 2250 | CARQHQDFWTGYYTVW |
| 10A-49 | 781 | RTFRRYTMG | 1516 | ASISRSGTTYYA | 2251 | CAKEGWRWLQLRGGFDYW |
| 10A-50 | 782 | RTLSTYNMG | 1517 | ASISRFGRTNYA | 2252 | CARRGKLSAAMHWFDPW |
| 10A-51 | 783 | RFFSTRVMG | 1518 | ARIWPGGSTYYA | 2253 | CARDRGIFGVSRW |
| 10A-52 | 784 | RFFSICSMG | 1519 | AGINWRSGGSTYYA | 2254 | CARGSGWWEYW |
| 10A-53 | 785 | RMFSSRSNMG | 1520 | ASISSGGTTAYA | 2255 | CARGFGRRFLEWLPRFDYW |
| 10A-54 | 786 | RTFSSARMG | 1521 | AGINMISSTKYA | 2256 | CAHFRRFLPRGYVDYW |
| 10A-55 | 787 | RTFRRYTMG | 1522 | ARIAGGSTYYA | 2257 | CARQQYYDFWSGYFRSGYFDLW |
| 10A-56 | 788 | HTFRNYGMG | 1523 | AAITSSGSTNYA | 2258 | CATVPPPRRFLEWLPRRLTYTW |
| 10A-57 | 789 | RTFSRYAMG | 1524 | ASITKFGSTNYA | 2259 | CAKERESRFLKWRKTDW |
| 10A-58 | 790 | RNLRMYRMG | 1525 | ASISRFGRTNYA | 2260 | CARHDSIGLFRHGMDVW |
| 10A-59 | 791 | RTFRRYAMG | 1526 | ARISSGGSTSYA | 2261 | CARDRGFGFWSGLRGYFDLW |
| 10A-60 | 792 | IPASMYLG | 1527 | AAITSGGRTSYA | 2262 | CAKRKKRGPLWFGGGGWGYW |
| 10A-61 | 793 | IPFRSRTFSAY | 1528 | AQITRGGSTNYA | 2263 | CARRHWFGFDYW |
| | | AMG | | | | |
| 9-1 | 794 | FTFSSYAMH | 1529 | AVISYDGNHEYYA | 2264 | CARGYKGYYYMDVW |
| 9-2 | 795 | FSFNNYGMH | 1530 | AVISFDGSNEYYA | 2265 | CAKENWLGYFDPW |
| 9-3 | 796 | FTFGTYAMH | 1531 | AVVSTEGGTTYYA | 2266 | CAGSYGAYFDYW |
| 9-4 | 797 | FDFSDYYMH | 1532 | AVISYDGSNKYYA | 2267 | CAREEPVYGMDVW |
| 9-5 | 798 | FTFGTYAMH | 1533 | AVVSTEGGTTYYA | 2268 | CAGSYGAYFDYW |
| 9-6 | 799 | FTFSGYAMH | 1534 | AVISYDGSNEYYA | 2269 | CARTNSGSYYGPFDYW |
| 9-7 | 800 | FTFSSYAMH | 1535 | AVISYDGNHEYYA | 2270 | CARGYKGYYYMDVW |
| 9-8 | 801 | FTFSSYAMH | 1536 | AVISYDGNHEYYA | 2271 | CARGYKGYYYMDVW |
| 9-9 | 802 | FIFRSYAMH | 1537 | AVISYDGSSKYYA | 2272 | CARPSSGSYFPPFDYW |
| 9-10 | 803 | FTFSDYGMH | 1538 | AVVSYDGTTKYYA | 2273 | CAKENWLGYFDPW |
| 9-11 | 804 | FTFSNFPMH | 1539 | AVISYDGSLKYYA | 2274 | CARYQGGYMDVW |
| 9-12 | 805 | FTFSRFAMH | 1540 | AVISYDGSNKYYA | 2275 | CARDTGLGFDPW |
| 9-13 | 806 | FTFNNYAMH | 1541 | AVISYDGNNKYYA | 2276 | CAKTMGGSYFDAFDIW |
| 9-14 | 807 | FTFSDYTMH | 1542 | AVISYEGSIKYYA | 2277 | CARSSSGSYPSLVDYW |
| 9-15 | 808 | #N/A | 1543 | #N/A | 2278 | CARDYWVDYFKPG |
| 10-1 | 809 | FTFSRYAMH | 1544 | AVISYDGTNEYYA | 2279 | CARDTGLGFDPW |
| 10-2 | 810 | FTFSRYAMH | 1545 | AVISYDGTNEYYA | 2280 | CARDTGLGFDPW |
| 10-3 | 811 | FTFSRYAMH | 1546 | AVISYDGTNEYYA | 2281 | CARDTGLGFDPW |
| 10-4 | 812 | FTFSRYAMH | 1547 | AVISYDGTNEYYA | 2282 | CARDTGLGFDPW |
| 10-5 | 813 | FTFSRYAMH | 1548 | AVISYDGTNEYYA | 2283 | CARDTGLGFDPW |
| 10-6 | 814 | FTFSRYAMH | 1549 | AVISYDGTNEYYA | 2284 | CARDTGLGFDPW |
| 11-1 | 815 | FTFGSYGMH | 1550 | AVISYDGGDEYYA | 2285 | CARDISRYGYYGMDVW |
| 11-2 | 816 | FTFGTYAMH | 1551 | AVVSTEGGTTYYA | 2286 | CAGSYGAYFDYW |
| 11-3 | 817 | FTFSNFAMH | 1552 | AVISYDGNHEYYA | 2287 | CAKTNSGSYGGMFDYW |
| 11-4 | 818 | FTFDNYAMH | 1553 | AVISDDGRNKYYA | 2288 | CAKDNYYDSSGYYGGGMDVW |
| 11-5 | 819 | FTFSSFAMH | 1554 | AVISYDGSNKYYA | 2289 | CARSRSGSYSSYFDYW |
| 11-6 | 820 | FTFGTYAMH | 1555 | AVVSTEGGTTYYA | 2290 | CAGEYYDSSGSSIDYW |
| 11-7 | 821 | FTFSSYAMH | 1556 | AVISYDGSNQYYA | 2291 | CARAKGGGYRGAFDIW |
| 11-8 | 822 | FTFSSYAMH | 1557 | AVISYDGSNTYYA | 2292 | CARPRGGSYWTYFDYW |
| 11-9 | 823 | FTFGTYAMH | 1558 | AVVSTEGGTTYYA | 2293 | CAGSYGAYFDYW |
| 11-10 | 824 | FIFNNYGMH | 1559 | AVISYDGSNIYYA | 2294 | CARDYNDGIGSYTGAFDSW |
| 11-11 | 825 | FTFDNYAMH | 1560 | AVISYDGSNKYYA | 2295 | CLREGILWDVW |
| 11-12 | 826 | FTFSSQAMH | 1561 | AVISYDGSNKYYA | 2296 | CAKTEGGTYGGAFDIW |
| 11-13 | 827 | FSFSSYGMH | 1562 | AVISYDGSDKYYA | 2297 | CAKDNYYDSSGYYGGGMDVW |
| 11-14 | 828 | FTFSSYSMH | 1563 | AVISYDGSHKYYA | 2298 | CARDGWGYFDYW |
| 11-15 | 829 | FIFSNYGMH | 1564 | AVISYDGSDKYYA | 2299 | CARDDYMYGFEHW |
| 11-16 | 830 | FTFSDHYMH | 1565 | AVISYDGSNEYYA | 2300 | CAKDLGPAGVDYW |
| 11-17 | 831 | FIFSSYAMH | 1566 | AVISYDGSNKYYA | 2301 | CARSRSGSYSSWFDYW |
| 11-18 | 832 | FTFGTYAMH | 1567 | AVISYDGNNKYYA | 2302 | CAKTGSGSYYSWFDYW |
| 11-19 | 833 | FTFSSYAMH | 1568 | AVISYDGTNDYYA | 2303 | CARTRGGSYFTPFDYW |
| 11-20 | 834 | FTFDDYAMH | 1569 | AVISYDGSNKYYA | 2304 | CASPHSGSYWAAFDIW |
| 12-12-1 | 835 | FTFSYYGMH | 1570 | AVTSYDGSNKYYA | 2305 | CARPQGGSYFAAFDIW |
| 12-2 | 836 | FIFRSYAMH | 1571 | AVISYDGSSKYYA | 2306 | CARPSSGSYFPPFDYW |
| 12-3 | 837 | FTFSSYAMH | 1572 | AVISYDGSNQYYA | 2307 | CAKTRTGSYFSAFDIW |
| 12-4 | 838 | FTFSYYGMH | 1573 | AVISYDGTNDYYA | 2308 | CAKPHSGSYRGYFDYW |
| 12-5 | 839 | FTFSYYGMH | 1574 | AVTSYDGSNKYYS | 2309 | CARPKSGSYATYFDYW |
| 12-6 | 840 | FIFRNYAMH | 1575 | AVISYDGSNKYYA | 2310 | CARPRGGSYHGAFDIW |
| 12-7 | 841 | FTFSIYAMH | 1576 | AVISYDGTNEYYA | 2311 | CAKSRGGSYYGAFDYW |
| 12-8 | 842 | FTFNNYVMH | 1577 | AVISYDGTNDYYA | 2312 | CARGESGSYWGAFDYW |
| 12-9 | 843 | FTFSSYGMH | 1578 | AVISYDGTTEYYA | 2313 | CARPSSGSYLGFFDYW |
| 12-10 | 844 | FIFRSYAMH | 1579 | AVISYDGSIKYYA | 2314 | CARTRGGSYYGAFDYW |
| 12-11 | 845 | FSFGGYGMH | 1580 | AVISYDGSNEYYA | 2315 | CAKSYSGSYSSYFDYW |
| 12-12 | 846 | FAFSSHAME | 1581 | AVISYDGSNKYYA | 2316 | CAKAYSGSYMGYFDYW |
| 12-13 | 847 | FSFSTYGMH | 1582 | AVISYDGSNKYYA | 2317 | CARPLSGSYWSWFDPW |
| 12-14 | 848 | FTFSSYSMH | 1583 | AVISYDGSNKYYA | 2318 | CARGKGGGYYSSFDFW |
| 12-15 | 849 | FSFGGYGMH | 1584 | AVISYDGSNKYYA | 2319 | CARPYSGSYISWFDYW |
| 12-16 | 850 | FIFRSYAMH | 1585 | AVISYDGSSKYYA | 2320 | CARTLGGSYFAAFDIW |
| 12-17 | 851 | FTFGSYGMH | 1586 | AVISYDGNHEYYA | 2321 | CARPHSGSYTAYFDYW |
| 12-18 | 852 | FTFSSYAMH | 1587 | AVISYDGSNQYYA | 2322 | CARGYGGSYSYFDYW |
| 12-19 | 853 | FAFSSYAMH | 1588 | AVISYDGTYEYYA | 2323 | CARSLGGSYFSGMDVW |
| 12-20 | 854 | FSFGGYGMH | 1589 | AVISYDGSNKYYA | 2324 | CARSKGGSYYGPFDYW |
| 12-21 | 855 | FSFGGYGMH | 1590 | AVISYDGSNKYYA | 2325 | CARPKGGNYWNAFDIW |
| 12-22 | 856 | FTFSSYGMH | 1591 | AVISYDGNHEYYA | 2326 | CARPKSGSYVSYFDYW |
| 12-23 | 857 | FIFSSYAMH | 1592 | AVISYDGSNKYYA | 2327 | CARPRGGNYLNYFDYW |
| 12-24 | 858 | FTFSNFPMH | 1593 | AVISYDGNNKYYA | 2328 | CAKDHGDHYFDYW |
| 12-25 | 859 | FTFSSYAMH | 1594 | AVISYDGSNQYYA | 2329 | CARDKGGSYYGPFDYW |
| 12-26 | 860 | FTFSNYAMH | 1595 | AVISYDGSNEYYA | 2330 | CAKSGSGSYFSPFDYW |
| 12-27 | 861 | FSFGGYGMH | 1596 | AVISYDGSTKYYA | 2331 | CARPRGGSYKDAFDIW |
| 12-28 | 862 | FTFSSYAMH | 1597 | AVISYDGTNEYYA | 2332 | CARAHGGSYFSGMDVW |
| 12-29 | 863 | FSFSNYGMH | 1598 | AVISYDGNNKYYA | 2333 | CARSKGGSYYGPFDDW |
| 12-30 | 864 | FTFSGYAMH | 1599 | AVISYDGSNKYYA | 2334 | CARSRGGSYYAPFDYW |
| 12-31 | 865 | #N/A | 1600 | #N/A | 2335 | CARPLGGSYFAAFDIW |
| 12-32 | 866 | FTFGTYAMH | 1601 | AVISYDGNNKYYA | 2336 | CAKTMSGSYFSAFDIW |
| 12-33 | 867 | FTFSSYAMH | 1602 | AVISYDGSNQYYA | 2337 | CARPHGGNYFDWFDPW |
| 12-34 | 868 | FIFRSYAMH | 1603 | AVISYDGSSKYYA | 2338 | CARPSGGSYFDPFDYW |
| 12-35 | 869 | FTFSSSSMH | 1604 | AVISYDGSNKYYA | 2339 | CAKVDSGSYVGYFDYW |
| 12-36 | 870 | FSFNNYGMH | 1605 | AVISYDGSNDYYA | 2340 | CARPNSGSYSNYFDYW |
| 12-37 | 871 | FTFSSYAMH | 1606 | AVISYDGSNQYYA | 2341 | CARSRSGSYLAYFDYW |
| 12-38 | 872 | FTFSSYAMH | 1607 | AVISYDGSNQYYA | 2342 | CARAAGGSYSSWFDPW |
| 12-39 | 873 | FTFSSYAMH | 1608 | AVISYDGNHEYYA | 2343 | CARAHSGSYFSHFDYW |
| 12-40 | 874 | FTFSSYAMH | 1609 | AVISYDGSNTYYA | 2344 | CARPTSGSYFSWFDPW |
| 12-41 | 875 | FIFSSYAMH | 1610 | AVISYDGSNKYYA | 2345 | CARPNSGSYWGPFDYW |
| 12-42 | 876 | FTFGSYGMH | 1611 | AVISYDGSHKYYA | 2346 | CARALGGNYYYFDYW |
| 12-43 | 877 | FIFSSYGMH | 1612 | AVISYDGSNEYYA | 2347 | CARPRSGSYLSAFDYW |
| 13-1 | 878 | FTFSSYSMH | 1613 | AVISYDGRNQYYA | 2348 | CAKGYGGNYYYMDGW |
| 13-2 | 879 | FTFSSYAMH | 1614 | AVISYDGNNKYYA | 2349 | CARTYGGSYYSAFDYW |
| 13-3 | 880 | FSFNNHAMH | 1615 | AVISYDGSDKYYA | 2350 | CARNLLRGYGMDVW |
| 13-4 | 881 | FAFDDYAMH | 1616 | AVISYDGSNKYYA | 2351 | CATLGYGDYPDYW |
| 13-5 | 882 | FIFRSYAMH | 1617 | AVISYDGSSKYYA | 2352 | CARPLGGGYQDAFDIW |

TABLE 10
Variable Region, Heavy Chain Complementary
Determining Region 3 (CDRH3)

| Variant | SEQ ID NO | CDRH3 Sequence |
|---|---|---|
| 1N-1 | 2353 | CAKEDVGKPFYW |
| 1N-2 | 2354 | CAKEDVGKPFFW |
| 1N-3 | 2355 | CAKEDVGKPFDW |
| 1N-4 | 2356 | CAKEDVGKPFCW |
| 1N-5 | 2357 | CAKEDVGKPFDW |
| 1N-6 | 2358 | CAKEDVGKPFDW |
| 1N-7 | 2359 | CAKEDVGKPFDW |
| 1N-8 | 2360 | CAKEDVGKPLDW |
| 1N-9 | 2361 | CAKEDVGPPFDW |
| 1N-10 | 2362 | CAKEDVGKPFHW |
| 1N-11 | 2363 | CAKEDVGPPFYW |
| 1N-12 | 2364 | CWKEDVGKPGDW |
| 1N-13 | 2365 | CAKEDVGKPFCW |
| 1N-14 | 2366 | CRKEDVGKPFFW |
| 1N-15 | 2367 | CYKEDVGKPFYW |
| 1N-16 | 2368 | CHKEDVGKPFYW |
| 1N-17 | 2369 | CFKEDVGKPFFW |
| 1N-18 | 2370 | CYKEDVGKPFFW |
| 1N-19 | 2371 | CFKEDVGKPFWW |
| 1N-20 | 2372 | CWKEDVGKPFDE |
| 1N-21 | 2373 | CARVDRDFDYW |
| 1N-22 | 2374 | CARVDRDFDYW |
| 1N-23 | 2375 | CARVTRDFDYW |
| 1N-24 | 2376 | CARVWRDFDYW |
| 1N-25 | 2377 | CARVDRDFDYW |
| 1N-26 | 2378 | CARVDRDFDYW |
| 1N-27 | 2379 | CARVDRDFDYW |
| 1N-28 | 2380 | CARVDRDFDYW |
| 1N-29 | 2381 | CARVDRDFDYW |
| 1N-30 | 2382 | CARVYRDFDYW |
| 1N-31 | 2383 | CARVDRDFDYW |
| 1N-32 | 2384 | CARVTRDFDYW |
| 1N-33 | 2385 | CARVDRDFDYW |
| 1N-34 | 2386 | CARVDRDFDYW |
| 1N-35 | 2387 | CARVSRDFDYW |
| 1N-36 | 2388 | CARVDGDFDYW |
| 1N-37 | 2389 | CARVDRDFDYW |
| 1N-38 | 4177 | CARVTRDFDYW |
| 1N-39 | 4178 | CARVDRDFDYW |
| 1N-40 | 4179 | CARVYRDFDYW |
| 1N-41 | 4180 | CARVTRDFDYW |
| 1N-42 | 4181 | CARVDRDFDYW |
| 1N-43 | 4182 | CARVDYDFDYW |
| 1N-44 | 4183 | CARVDRDFDYW |
| 1N-45 | 4184 | CARVDRDFDYW |
| 1N-46 | 4185 | CWRLGNDYFDYW |
| 1N-47 | 4186 | CWRLGNDYFDYW |
| 1N-48 | 4187 | CWRLGNDYFDYW |
| 1N-49 | 4188 | CWRLGNDYFDYW |
| 1N-50 | 4189 | CWRYGNDYFDYW |
| 1N-51 | 4190 | CWRFGNDYFDYW |
| 1N-52 | 4191 | CWRLGNDYFDYW |
| 1N-53 | 4192 | CWRLGNDYFDYW |
| 1N-54 | 4193 | CWRLGNDYFDYW |
| 1N-55 | 4194 | CWRLGNDYFDYW |
| 1N-56 | 4195 | CWRLGNDYFDYW |
| 1N-57 | 4196 | CWRLGNDYFDYW |
| 1N-58 | 4197 | CWREGNDYFDYW |
| 1N-59 | 4198 | CWREGNDYFDYW |
| 1N-60 | 4199 | CWRLGNDYFDYW |
| 1N-61 | 4200 | CWRGGNDYFDYW |
| 1N-62 | 4201 | CWRLGNDYFDYW |
| 1N-63 | 4202 | CWRLGNDYFDYW |
| 1N-64 | 4203 | CWRLGNDYFDYW |
| 1N-65 | 4204 | CWRYGNDYFDYW |
| 1N-66 | 4205 | CWRYGNDYFDYW |
| 1N-67 | 4206 | CWRLGNDYFDYW |
| 1N-68 | 4207 | CWRLTNDYFDYW |
| 1N-69 | 4208 | CWRLGNDYFDYW |
| 1N-70 | 4209 | CWRLGNDYFDYW |
| 1N-71 | 4210 | CWRYGNDYFDYW |
| 1N-72 | 4211 | CWRYGNDYFDYW |
| 1N-73 | 4212 | CWRLGNDYFDYW |
| 1N-74 | 2390 | CWRLGNDYFDYW |
| 1N-75 | 2391 | CWRYGNDYFDYW |
| 1N-76 | 2392 | CWRLGNDYFDYW |
| 1N-77 | 2393 | CWRFGNDYFDYW |
| 1N-78 | 2394 | CPRLGNDYFDYW |
| 1N-79 | 2395 | CWRTGNDYFDYW |
| 1N-80 | 2396 | CWRHGNDYFDYW |
| 1N-81 | 2397 | CAGDYDFWSGFDHW |
| 1N-82 | 2398 | CARHYYDSSDYYPHYYYYGMDVW |
| 1N-83 | 2399 | CARHMGYYDSGTYFDYFDYW |
| 1N-84 | 2400 | CTTVDQYFDYW |
| 1N-85 | 2401 | CARYDFWSGYPYW |
| 1N-86 | 2402 | CAKFAVYDYWSGTSFDYW |
| 1N-87 | 2403 | CTSLVGLTAGFADYW |
| 1N-88 | 2404 | CAAFDGYTGSDW |
| 1N-89 | 2405 | CAGDYDFWSGFDHW |
| 1N-90 | 2406 | CARADNYFDYW |
| 1N-91 | 2407 | CAAFDGYTGSDW |
| 1N-92 | 2408 | CARDYGDYYYFDYW |
| 1N-93 | 2409 | CAKGPSSGYAFDIW |
| 1N-94 | 2410 | CTTVDQYFDYW |
| 1N-95 | 2411 | CTTVDQYFDYW |
| 1N-96 | 2412 | CAAFDGYSGSDW |
| 1N-97 | 2413 | CTTFNWNDEGFDYW |
| 1N-98 | 2414 | CAAFDGYTGSDW |
| 1N-99 | 2415 | CVRSNMAGFDHW |
| 1N-100 | 2416 | CAAFDGYSGSDW |

TABLE 11
Variable Domain Light Chain Sequences

| | SEQ ID | | SEQ ID | | SEQ ID | |
|---|---|---|---|---|---|---|
| Variant | NO | CDRL1 | NO | CDRL2 | NO | CDRL3 |
| 2A-1 | 2417 | RASQSIHRFLN | 2587 | AASNLHS | 2757 | CQQSYGLPPTF |
| 2A-2 | 2418 | RASQTINTYLN | 2588 | SASTLQS | 2758 | CQQSYSTFTF |
| 2A-3 | 2419 | RASQNIHTYLN | 2589 | AASTFAK | 2759 | CQQSYSAPPYTF |
| 2A-4 | 2420 | RASQSIDTYLN | 2590 | AASALAS | 2760 | CQQSYSAPPYTF |
| 2A-5 | 2421 | RASQSIHTYLN | 2591 | AASALAS | 2761 | CQQSYSAPPYTF |
| 2A-6 | 2422 | RASQSIDTYLN | 2592 | AASALAS | 2762 | CQQSYSAPPYTF |
| 2A-7 | 2423 | RASQSIDTYLN | 2593 | AASALAS | 2763 | CQQSYSAPPYTF |
| 2A-8 | 2424 | RASQSIDTYLN | 2594 | AASALAS | 2764 | CQQSYSAPPYTF |
| 2A-9 | 2425 | RASQRIGTYLN | 2595 | AASNLEG | 2765 | CQQNYSTTWTF |
| 2A-10 | 2426 | RASQSIHISLN | 2596 | LASPLAS | 2766 | CQQSYSAPPYTF |
| 2A-11 | 2427 | RASQSIGNYLN | 2597 | GVSSLQS | 2767 | CQQSHSAPLTF |
| 2A-12 | 2428 | RASQSIDNYLN | 2598 | GVSALQS | 2768 | CQQSHSAPPYFF |
| 2A-13 | 2429 | RASQSIDTYLN | 2599 | GASALES | 2769 | CQQSHSAPPYFF |
| 2A-14 | 2430 | RASQSIDTYLN | 2600 | GVSALQS | 2770 | CQQSYSAPPYFF |
| 2A-15 | 2431 | RASQSIDNYLN | 2601 | GVSALQS | 2771 | CQQSHSAPLTF |
| 3A-1 | 2432 | RASQTIYSYLN | 2602 | ATSTLQG | 2772 | CQHRGTF |
| 3A-2 | 2433 | RTSQSINTYLN | 2603 | GASNVQS | 2773 | CQQSYRIPRTF |
| 3A-3 | 2434 | RASRSISRYLN | 2604 | AASSLQA | 2774 | CQQSYSSLLTF |
| 3A-4 | 2435 | RASRSIRRYLN | 2605 | ASSSLQA | 2775 | CQQSYSTLLTF |
| 3A-5 | 2436 | RASQSIGRYLN | 2606 | AASSLKS | 2776 | CQQSYSLPRTF |
| 3A-6 | 2437 | RASQSIGKYLN | 2607 | ASSSLQS | 2777 | CQQSYSPPFTF |
| 3A-7 | 2438 | RASQSIGRYLN | 2608 | ASSSLQS | 2778 | CQQSYSLPRTF |
| 3A-8 | 2439 | RASQSIGRYLN | 2609 | AASSLKS | 2779 | CQQSYSLPLTF |
| 3A-9 | 2440 | RASQSIGRYLN | 2610 | AASSLKS | 2780 | CQQSYSLPRTF |
| 3A-10 | 2441 | RASQSIRKYLN | 2611 | ASSTLQR | 2781 | CQQSLSTPFTF |
| 3A-11 | 2442 | RASQSIGKYLN | 2612 | ASSTLQR | 2782 | CQQSLSPPFTF |
| 3A-12 | 2443 | RASQSIGKYLN | 2613 | ASSTLQR | 2783 | CQQSLSTPFTF |
| 3A-13 | 2444 | RASQSIGKYLN | 2614 | ASSTLQR | 2784 | CQQSFSPPFTF |
| 3A-14 | 2445 | RASQSIGKYLN | 2615 | ASSTLQR | 2785 | CQQSFSTPFTF |
| 3A-15 | 2446 | RASQNIKTYLN | 2616 | AASKLQS | 2786 | CQQSYSTSPTF |
| 2A-1 | 2447 | RASQSIHRFLN | 2617 | AASNLHS | 2787 | CQQSYGLPPTF |
| 2A-10 | 2448 | RASQSIHISLN | 2618 | LASPLAS | 2788 | CQQSYSAPPYTF |
| 2A-5 | 2449 | RASQSIHTYLN | 2619 | AASALAS | 2789 | CQQSYSAPPYTF |
| 2A-2 | 2450 | RASQTINTYLN | 2620 | SASTLQS | 2790 | CQQSYSTFTF |
| 2A-4 | 2451 | RASQSIDTYLN | 2621 | AASALAS | 2791 | CQQSYSAPPYTF |
| 2A-6 | 2452 | RASQSIGNYLN | 2622 | GVSSLQS | 2792 | CQQSHSAPLTF |
| 2A-11 | 2453 | RASQSIDTYLN | 2623 | AASALAS | 2793 | CQQSYSAPPYTF |
| 2A-12 | 2454 | RASQSIDNYLN | 2624 | GVSALQS | 2794 | CQQSHSAPPYFF |
| 2A-13 | 2455 | RASQSIDTYLN | 2625 | GASALES | 2795 | CQQSHSAPPYFF |
| 2A-14 | 2456 | RASQSIDTYLN | 2626 | AASALAS | 2796 | CQQSYSAPPYTF |
| 2A-7 | 2457 | RASQSIDTYLN | 2627 | GVSALQS | 2797 | CQQSYSAPPYFF |
| 2A-8 | 2458 | RASQSIDTYLN | 2628 | AASALAS | 2798 | CQQSYSAPPYTF |
| 2A-15 | 2459 | RASQSIDNYLN | 2629 | GVSALQS | 2799 | CQQSHSAPLTF |
| 2A-9 | 2460 | RASQRIGTYLN | 2630 | AASNLEG | 2800 | CQQNYSTTWTF |
| 2A-21 | 2461 | RASQSIHTYLN | 2631 | AASALAS | 2801 | CQQSYSAPPYTF |
| 2A-22 | 2462 | RASQSIHTYLN | 2632 | AASALAS | 2802 | CQQSYSAPPYTF |
| 2A-23 | 2463 | RASQTINTFLN | 2633 | SASTLQS | 2803 | CQQSYSTFTF |
| 2A-24 | 2464 | RASQTIRTYLN | 2634 | DASTLQR | 2804 | CQQSYRTPPWTF |
| 2A-25 | 2465 | RSSQSISSYLN | 2635 | GASRLRS | 2805 | CQQGYSAPWTF |
| 2A-26 | 2466 | RASQSISGSLN | 2636 | AESRLHS | 2806 | CQQSYSPPQTF |
| 2A-27 | 2467 | RASRSISTYLN | 2637 | AASNLQG | 2807 | CQQSHSIPRTF |
| 2A-28 | 2468 | RASQSIHTYLN | 2638 | AASALAS | 2808 | CQQSYSAPPYTF |
| 3A-10 | 2469 | RASQSIRKYLN | 2639 | ASSTLQR | 2809 | CQQSLSTPFTF |
| 3A-4 | 2470 | RASQNIKTYLN | 2640 | AASKLQS | 2810 | CQQSYSTSPTF |
| 3A-7 | 2471 | RASQTIYSYLN | 2641 | ATSTLQG | 2811 | CQHRGTF |
| 3A-1 | 2472 | RASRSIRRYLN | 2642 | ASSSLQA | 2812 | CQQSYSTLLTF |
| 3A-5 | 2473 | RASQSIGKYLN | 2643 | ASSSLQS | 2813 | CQQSYSPPFTF |
| 3A-6 | 2474 | RASRSISRYLN | 2644 | AASSLQA | 2814 | CQQSYSSLLTF |
| 3A-15 | 2475 | RASQSIGKYLN | 2645 | ASSTLQR | 2815 | CQQSLSPPFTF |
| 3A-3 | 2476 | RASQSIGRYLN | 2646 | ASSSLQS | 2816 | CQQSYSLPRTF |
| 3A-11 | 2477 | RASQSIGRYLN | 2647 | AASSLKS | 2817 | CQQSYSLPRTF |
| 3A-8 | 2478 | RASQSIGKYLN | 2648 | ASSTLQR | 2818 | CQQSLSTPFTF |
| 3A-2 | 2479 | RASQSIGRYLN | 2649 | AASSLKS | 2819 | CQQSYSLPLTF |
| 3A-12 | 2480 | RTSQSINTYLN | 2650 | GASNVQS | 2820 | CQQSYRIPRTF |
| 3A-14 | 2481 | RASQSIGKYLN | 2651 | ASSTLQR | 2821 | CQQSFSPPFTF |
| 3A-9 | 2482 | RASQSIGKYLN | 2652 | ASSTLQR | 2822 | CQQSFSTPFTF |
| 3A-13 | 2483 | RASQSIGRYLN | 2653 | AASSLKS | 2823 | CQQSYSLPRTF |
| 3A-16 | 2484 | RASQIIGSYLN | 2654 | TTSNLQS | 2824 | CQQSYITPWTF |
| 3A-17 | 2485 | RASQSISRYIN | 2655 | EASSLES | 2825 | CQQSHITPLTF |
| 3A-18 | 2486 | RASQSIYTYLN | 2656 | SASNLHS | 2826 | CQQSDTTPWTF |
| 3A-19 | 2487 | RASQSIATYLN | 2657 | GASSLEG | 2827 | CQQTFSSPFTF |
| 3A-2 | 2488 | RASQNINTYLN | 2658 | SASSLQS | 2828 | CQQSSLTPWTF |
| 3A-21 | 2489 | RASQGIATYLN | 2659 | YASNLQS | 2829 | CQQSYSTRFTF |
| 3A-22 | 2490 | RASERISNYLN | 2660 | TASNLES | 2830 | CQQSYTPPRTF |
| 3A-23 | 2491 | RASQSISSSLN | 2661 | AASRLQD | 2831 | CQQSYSTPRSF |
| 3A-24 | 2492 | RASQSISSHLN | 2662 | RASTLQS | 2832 | CQQTYNTPQTF |
| 3A-25 | 2493 | RASQSISSYLI | 2663 | AASRLHS | 2833 | CQQGYNTPRTF |
| 3A-26 | 2494 | RASPSISTYLN | 2664 | TASRLQT | 2834 | CQQTYSTPSSF |
| 3A-27 | 2495 | RASQNIAKYLN | 2665 | GASGLQS | 2835 | CQQSHSPPITF |
| 3A-28 | 2496 | RASQSIGTYLN | 2666 | AASNLHS | 2836 | CQESYSAPYTF |
| 3A-29 | 2497 | RASQSISPYLN | 2667 | KASSLQS | 2837 | CQQSSSTPYTF |
| 9-1 | 2498 | RASQGVSNYLA | 2668 | DASNRAT | 2838 | CQQRYSWVTF |
| 9-2 | 2499 | RASQSVSSSLA | 2669 | DASNRAT | 2839 | CQQRINWPRSF |
| 9-3 | 2500 | RASQSVNSYLA | 2670 | DVSNRAT | 2840 | CQQFSNWPTF |
| 9-4 | 2501 | RASQSVGTSLA | 2671 | GASNRAT | 2841 | CQQRSNWQPF |
| 9-5 | 2502 | RATQYVNSYLA | 2672 | DVSNRAT | 2842 | CQQFSNWPTF |
| 9-6 | 2503 | RASQSVGTSLA | 2673 | GASNRAT | 2843 | CQLRSNWYTF |
| 9-7 | 2504 | RASQGVSNYLA | 2674 | DASNRAT | 2844 | CQQRYSWVTF |
| 9-8 | 2505 | RASQGVSNYLA | 2675 | DASNRAT | 2845 | CQQRYSWVTF |
| 9-9 | 2506 | RASQSVDSRLA | 2676 | DTSNRAT | 2846 | CQQRSTWPPVF |
| 9-10 | 2507 | RASQSVRHHLA | 2677 | DASNRAT | 2847 | CQQRTDWPRAF |
| 9-11 | 2508 | RASQSVGNFLA | 2678 | DASNRAT | 2848 | CQQSSTWPLTF |
| 9-12 | 2509 | RASESISTYLA | 2679 | DASNRAT | 2849 | CQQRSGLITF |
| 9-13 | 2510 | RASQSVGDFLA | 2680 | DTSNRAT | 2850 | CQQRSNLTF |
| 9-14 | 2511 | RASQTIRNSLN | 2681 | ASSSLQS | 2851 | CQQTHSIPKTF |
| 9-15 | 2512 | RASQSVSSSLA | 2682 | DASNRAT | 2852 | CQQRINWPRSF |
| 10-1 | 2513 | RASQDVSTYLA | 2683 | DASNRAT | 2853 | CQQRRDWPQTF |
| 10-2 | 2514 | RASQDVSTYLA | 2684 | DASNRAT | 2854 | CQQRRDWPQTF |
| 10-3 | 2515 | RASQDVSTYLA | 2685 | DASNRAT | 2855 | CQQRRDWPQTF |
| 10-4 | 2516 | RASQDVSTYLA | 2686 | DASNRAT | 2856 | CQQRRDWPQTF |
| 10-5 | 2517 | RASQDVSTYLA | 2687 | DASNRAT | 2857 | CQQRRDWPQTF |
| 10-6 | 2518 | RASQDVSTYLA | 2688 | DASNRAT | 2858 | CQQRRDWPQTF |
| 11-1 | 2519 | RASQSLGSFLA | 2689 | DASNRAT | 2859 | CQQRALWPRLTF |
| 11-2 | 2520 | RASQSVNSYLA | 2690 | DVSNRAT | 2860 | CQQFSNWPTF |
| 11-3 | 2521 | RASQNIGNHLA | 2691 | DASNRAT | 2861 | CQQRDNGPPEGTF |
| 11-4 | 2522 | RASQSVGSYLA | 2692 | DAVNRAT | 2862 | CQQRFTWPTTF |
| 11-5 | 2523 | RASQSITDYLA | 2693 | DASNRAT | 2863 | CHQRNNWPPTF |
| 11-6 | 2524 | RASQSVDSSLA | 2694 | DASNRAT | 2864 | CQQQSNWPGTF |
| 11-7 | 2525 | RASQSIGSYLA | 2695 | DGSNRAT | 2865 | CQQRTNWPLFSF |
| 11-8 | 2526 | RASQTVTNYLA | 2696 | DTSNRAT | 2866 | CQHRDDWPPTF |
| 11-9 | 2527 | RASQSVSYYLA | 2697 | DSSNRAT | 2867 | CQQRSNWQGNF |
| 11-10 | 2528 | RASQSVSTSLA | 2698 | DATNRAT | 2868 | CQQHYSWPLTF |
| 11-11 | 2529 | RASHNINNFLA | 2699 | DTSNRAT | 2869 | CQQGRNWPPSSF |
| 11-12 | 2530 | RASQSVGTSLA | 2700 | GASNRAT | 2870 | CQERSNWPDTF |
| 11-13 | 2531 | RASQSVSSQLA | 2701 | DTSNRAT | 2871 | CQQRYNWPSTF |
| 11-14 | 2532 | RASQSVDSRLA | 2702 | DASNRAT | 2872 | CQQRTNLPPSITF |
| 11-15 | 2533 | RASQSVGSYLA | 2703 | DAVNRAT | 2873 | CQQRSDSITF |
| 11-16 | 2534 | #N/A | 2704 | #N/A | 2874 | #N/A |
| 11-17 | 2535 | RASQNIGSHLA | 2705 | DVSNRAT | 2875 | CQQRDYWPPYTF |
| 11-18 | 2536 | RASQSLTSYLA | 2706 | DASNRAT | 2876 | CQQRHYWPPITF |
| 11-19 | 2537 | RASQSIGSYLA | 2707 | DASNRAT | 2877 | CQQRDSWPHTF |
| 11-20 | 2538 | RASQSVGSYLA | 2708 | DAVNRAT | 2878 | CQQRSLWPF |
| 12-1 | 2539 | RASQSVSSHLA | 2709 | DVSNRAT | 2879 | CQQRDTFTF |
| 12-2 | 2540 | RASQSVDSRLA | 2710 | DTSNRAT | 2880 | CQQRSTWPPVF |
| 12-3 | 2541 | RASQSVGDFLA | 2711 | DTSNRAT | 2881 | CQYRSNFTF |
| 12-4 | 2542 | RASQSVGSHLA | 2712 | DASNRAT | 2882 | CQQISNWPLTF |
| 12-5 | 2543 | RASQNVGQSLA | 2713 | DASNRAT | 2883 | CQQRENWPPTF |
| 12-6 | 2544 | RASQSLGNYLA | 2714 | DSSNRAT | 2884 | CQQRNWPYTF |
| 12-7 | 2545 | RASQSLGNYLA | 2715 | DSSNRAT | 2885 | CQQRTDWPPSF |
| 12-8 | 2546 | RASQNIGNHLA | 2716 | DVSNRAT | 2886 | CQQRKSWPPFTF |
| 12-9 | 2547 | RASQSVSTSLA | 2717 | DATNRAT | 2887 | CQRRTDWPPTF |
| 12-10 | 2548 | RASQSVNSDLA | 2718 | DASNRAT | 2888 | CQQRTDWPPATF |
| 12-11 | 2549 | RASQSVGSYLA | 2719 | DAVNRAT | 2889 | CQQRFTWPTTF |
| 12-12 | 2550 | RASQSVSSSLA | 2720 | DASNRAT | 2890 | CQHRDDWPPTF |
| 12-13 | 2551 | RASQSVGSYLA | 2721 | DAVNRAT | 2891 | CQQRNSWPPATF |
| 12-14 | 2552 | RASQSVGSYLA | 2722 | DAVNRAT | 2892 | CQQVSNWPLTF |
| 12-15 | 2553 | RASQSVSSHLA | 2723 | DVSNRAT | 2893 | CQVRSDWPPLTF |
| 12-16 | 2554 | RASQSLDSYLA | 2724 | DVSNRAT | 2894 | CQQRRGWPPVTF |
| 12-17 | 2555 | RASQSVSKFLA | 2725 | DASNRAT | 2895 | CHQHSDWPLTF |
| 12-18 | 2556 | RASQSIGGSLA | 2726 | DASNRAT | 2896 | CQQRYSYFTF |
| 12-19 | 2557 | RASQSISRYLA | 2727 | DVSNRAT | 2897 | CQQSSNWPLFTF |
| 12-20 | 2558 | RASQSLGNYLA | 2728 | DSSNRAT | 2898 | CQQRNTWPGVTF |
| 12-21 | 2559 | RASQSVNSDLA | 2729 | DASNRAT | 2899 | CQERSLF |
| 12-22 | 2560 | RASQSVRHHLA | 2730 | DASNRAT | 2900 | CQERSDWPITF |
| 12-23 | 2561 | RASQSVDSRLA | 2731 | DASNRAT | 2901 | CQQRSTWPPVF |
| 12-24 | 2562 | RASQSFGDSLA | 2732 | DASNRAT | 2902 | CQQRSIPITF |
| 12-25 | 2563 | RASQSVNSYLA | 2733 | DVSNRAT | 2903 | CQERGNWPPFTF |
| 12-26 | 2564 | RASQSVSTSLA | 2734 | DISNRAT | 2904 | CQQRRSGLTF |
| 12-27 | 2565 | RASDTVSSYLA | 2735 | DTSNRAT | 2905 | CQQRASWPLSF |
| 12-28 | 2566 | RASQSVRHHLA | 2736 | DASNRAT | 2906 | CQQSGSWPLTF |
| 12-29 | 2567 | RASQIISSYLA | 2737 | DTSNRAT | 2907 | CQVRSNWPPLTF |
| 12-30 | 2568 | RASHNIGTYLA | 2738 | DVSNRAT | 2908 | CQQRADWPQTF |
| 12-31 | 2569 | #N/A | 2739 | #N/A | 2909 | #N/A |
| 12-32 | 2570 | RASQSIGSYLA | 2740 | DVSNRAT | 2910 | CQQRDSFTF |
| 12-33 | 2571 | RASQDVSTYLA | 2741 | DASNRAT | 2911 | CQQRAYWPGTF |
| 12-34 | 2572 | RASQSVGNFLA | 2742 | DASNRAT | 2912 | CQHRRLLTF |
| 12-35 | 2573 | RASQRVSSYLA | 2743 | DAFNRAT | 2913 | CQQRQDWPLTF |
| 12-36 | 2574 | RASQGISTYLA | 2744 | DASNRAT | 2914 | CQQRRRWPPTF |
| 12-37 | 2575 | RASESVSESLA | 2745 | DASNRAT | 2915 | CQQRTHGVTF |
| 12-38 | 2576 | RASQSVSTSLA | 2746 | DATNRAT | 2916 | CQQRQKWPLTF |
| 12-39 | 2577 | RASESISTYLA | 2747 | DASNRAT | 2917 | CQQRRNSLTF |
| 12-40 | 2578 | RASQSVNSDLA | 2748 | DASNRAT | 2918 | CQQRSTWSPLTF |
| 12-41 | 2579 | RASQNVGQSLA | 2749 | DASNRAT | 2919 | CQLRTNWPPVTF |
| 12-42 | 2580 | RASQSVDSRLA | 2750 | DTSNRAT | 2920 | CQQRSSNWTF |
| 12-43 | 2581 | RASQSVGKSLA | 2751 | DTSNRAT | 2921 | CQQRGSFPLTF |
| 13-1 | 2582 | RASQSVGDFLA | 2752 | DTSNRAT | 2922 | CQQRSIRGTF |
| 13-2 | 2583 | RASDTVSSYLA | 2753 | DTSNRAT | 2923 | CQQRGGWPPAF |
| 13-3 | 2584 | RASQSIGDYLN | 2754 | EASSLQS | 2924 | CLHTYLPPYSF |
| 13-4 | 2585 | RASQSITRYLN | 2755 | AASSLQS | 2925 | CQQTYNFPHTF |
| 13-5 | 2586 | RASQSIGSYLA | 2756 | DVSNRAT | 2926 | CQQRHHWPPVTF |

TABLE 12
Variable Domain Heavy Chain Sequences

| | SEQ | |
|---|---|---|
| Variant | ID NO | Sequence |
| 1-1 | 2927 | EVQLLESGGGLVQPGGSLRLSCAASGFTFSSYAMNWVRQAPGKGLEWVSAISGSGVST |
| | | YYADSVKGRFTISRDNSKNTLYLQMNSLRAEDTAVYYCAKGDSGSYYGSSYFDYWGQ |
| | | GTLVTVSS |
| 1-2 | 2928 | EVQLLESGGGLVQPGGSLRLSCAASGFTFSSYGMSWVRQAPGKGLEWVSAISGSGGNT |
| | | YYADSVKGRFTISRDNSKNTLYLQMNSLRAEDTAVYYCTRVRRGSGVAPYSSSWGRY |
| | | YFDYWGQGTLVTVSS |
| 1-3 | 2929 | EVQLLESGGGLVQPGGSLRLSCAASGFRFSSYSMSWVRQAPGKGLEWVSAISGSGGSS |
| | | YYADSVKGRFTISRDNSKNTLYLQMNSLRAEDTAVYYCAKDGSGTIFGVVIAKYYFDY |
| | | WGQGTLVTVSS |
| 1-4 | 2930 | EVQLLESGGGLVQPGGSLRLSCAASGFTFSAYAMSWVRQAPGKGLEWVSAISGSGGST |
| | | HYADSVKGRFTISRDNSKNTLYLQNSLRAEDTAVYYCASWGPLWSGSPNDAFDIWGQ |
| | | GTLVTVSS |
| 1-5 | 2931 | EVQLLESGGGLVQPGGSLRLSCAASGFFSSYAMGWVRQAPGKGLEWVSAISGSGYSTY |
| | | YADSVKGRFTISRDNSKNTLYLQMNSLRAEDTAVYYCARVRSYDSTAYDEPLDALDI |
| | | WGQGTLVTVSS |
| 1-6 | 2932 | EVQLLESGGGLVQPGGSLRLSCAASGFTFSSFAMSWVRQAPGKGLEWVSAISGSGVST |
| | | YYADSVKGRFTISRDNSKNTLYLQMNSLRAEDTAVYYCGRDARSSGYNGYDLFDIWG |
| | | QGTLVTVSS |
| 1-7 | 2933 | EVQLLESGGGLVQPGGSLRLSCAASGFTFSAYAMSWRQAPGKGLEWVSAISGSGGSYY |
| | | ADSVKGRFTISRDNSKNTLYLQMNSLRAEDTAVYYCAKGPLVGWYFDLWGQGTLVT |
| | | VSS |
| 1-8 | 2934 | EVQLLESGGGLVQPGGSLRLSCAASGFTFGSYAMSWVRQAPGKGLEWVSLISGSGGST |
| | | YYADSVKGRFTISRDNSKNTLYLQMNSLRAEDTAVYYCASWGPLWSGSPNDAFDIWG |
| | | QGTLVTVSS |
| 1-9 | 2935 | EVQLLESGGGLVQPGGSLRLSCAASGFTFSAYAMSWVRQAPGKGLEWVSAISGSGGST |
| | | FYADSVKGRFTISRDNSKNTLYLQMNSLRAEDTAVYYCTRQGDSSGWYDGWFDPWG |
| | | QGTLVTVSS |
| 1-10 | 2936 | EVQLLESGGGLVQPGGSLRLSCAASGFIFSSYAMSWVRQAPGKGLEWVSIISGSGGSTY |
| | | YADSVKGRFTISRDNSKNTLYLQMNSLRAEDTAVYYCIATVVSPLDYWGQGTLVTVSS |
| 1-11 | 2937 | EVQLLESGGGLVQPGGSLRLSCAASGFTFSDYAMSWVRQAPGKGLEWVSTISGSGGST |
| | | YYADSVKGRFTISRDNSKNTLYLQMNSLRAEDTAVYYCARDESSSSLNWFDPWGQGT |
| | | LVTVSS |
| 1-12 | 2938 | EVQLLESGGGLVQPGGSLRLSCAASGFTFSSYAMIWVRQAPGKGLEWVSAISGSAGST |
| | | YYADSVKGRFTISRDNSKNTLYLQMNSLRAEDTAVYYCASPDPLGSVADLDYWGQGT |
| | | LVTVSS |
| 1-13 | 2939 | EVQLLESGGGLVQPGGSLRLSCAASGFTFGSYAMSWVRQAPGKGLEWVSAISGSGGTT |
| | | YYADSVKGRFTISRDNSKNTLYLQMNSLRAEDTAVYYCARVWSSSSVFDYWGQGTLV |
| | | TVSS |
| 1-14 | 2940 | EVQLLESGGGLVQPGGSLRLSCAASGFTFSRYAMSWRQAPGKGLEWVSAISGSGASTY |
| | | YADSVKGRFTISRDNKNTLYLQMNSLRAEDTAVYYCAKDRGGGSYYGTFDYWGQGT |
| | | LVTVSS |
| 1-15 | 2941 | EVQLLESGGGLVQPGGSLRLSCAASGSTFSSYAMSWVRQAPGKGLEWVSAISGSGATY |
| | | YADSVKGRFTISRDNSKNTLYLQMNSLRAEDTAVYYCTRVRVAGYSSSWYDAFDIWG |
| | | QGTLVTVSS |
| 1-16 | 2942 | EVQLLESGGGLVQPGGSLRLSCAASGFTFSSYAMTWVRQAPGKGLEWVSAISGSGGNT |
| | | YYADSVKGRFTISRDNSKNTLYLQMNSLRAEDTAVYYCVKGTIPIFGVIRSAFDYWGQ |
| | | GTLVTVSS |
| 1-17 | 2943 | EVQLLESGGGLVQPGGSLRLSCAASGFTFSSYVMSWVRQAPGKGLEWVSSISGSGGST |
| | | YYADSVKGRFTISRDNSKNTLYLQMNSLRAEDTAVYYCARGSGSYSFFDYWGQGTLV |
| | | TVSS |
| 1-18 | 2944 | EVQLLESGGGLVQPGGSLRLSCAASGFTFSSYANWVRQAPGKGLEWVSAISGSGVSTY |
| | | YADSVKGRFTISRDNSKNTLYLQMNSLRAEDTAVYYCATTPGPWIQLWFGGGFDYWG |
| | | QGTLVTVSS |
| 1-19 | 2945 | EVQLLESGGGLVQPGGSLRLSCAASGFTFSSYDMSWVRQAPGKGLEWVSAISGSAGST |
| | | TMRDSVKGRFTISRDNSKNTLYLQMNSLRAEDTAVYYCAKDGLVVAGTFDYWGQGT |
| | | LVTVSS |
| 1-20 | 2946 | EVQLLESGGGLVQPGGSLRLSCAASGFTFSGYAMSWVRQAPGKGLEWVSALSGSGGS |
| | | TYYADSVKGRFTISRDNSKNTLYLQMNSLRAEDTAVYYCARGALLEWLSRFDNWGQG |
| | | TLVTVSS |
| 1-21 | 2947 | EVQLLESGGGLVQPGGSLRLSCAASGFTLSSYAMSWVRQAPGKGLEWVSAISGSGGTT |
| | | YYADSVKGFTISRDNSKNTLYLQMNSLRAEDTAVYYCARDLGAADLIDYWGQGTLVT |
| | | VSS |
| 1-22 | 2948 | EVQLLESGGGLVQPGGSLRLSCAASGFIFSSYAMSWVRQAPGKGLEWISAISGSGGTYY |
| | | ADSVKGRFTISRDNSKNTLYLQMNSPRAEDTAVYYCVRVPAAAGKGVPGIFDIWGQGT |
| | | LVTVSS |
| 1-23 | 2949 | EVQLLESGGGLVQPGGSLRLSCAASGFTFSSYAMGWVRQAPGKGLEWVSAIRGSGGST |
| | | YYADSVKGRFTISRDNSKNTLYLQMNSLRAEDTAVYYCARVRQGLRRTWYYFDYWG |
| | | QGTLVTVSS |
| 1-24 | 2950 | EVQLLESGGGLVQPGGSLRLSCAASGSTFSSYAMSWVRQAPGKGLEWVSAIGGSGGST |
| | | YYADSVKGRFTISRDNSKNTLYLQMNSLRAEDTAVYYCAKEYSSSWFDPWGQGTLVT |
| | | VSS |
| 1-25 | 2951 | EVQLLESGGGLVQPGGSLSCAASGFTFSSYTMSWVRQAPGKGLEWVSAISVSGGSTYY |
| | | ADSVKGRFTISRDNSKNTLYLQMNSLRAEDTAVYYCAKREDYDFWSGRGAFDIWGQG |
| | | TLVTIS |
| 1-26 | 2952 | EVQLLESGGGLVQPGGSLRLSCAASGFTFSSYAMYWVRQAPGKGLEWVSAISGSGGTY |
| | | YADSVKGRFTISRDNSKNTLYLQMNSLRAEDTAVYYCAKDIGYSSSWSFDYWGQGTL |
| | | VTVSS |
| 1-27 | 2953 | EVQLLESGGGLVQPGGSLRLSCAASGFTFRSYAMSWVRQAPGKGLEWVSAISGSGRST |
| | | YYASVKGRFTISRDNSKNTLYLQMNSLRAEDTAVYYCARDDYSDYRPFDYWGQGTLV |
| | | TVSS |
| 1-28 | 2954 | EVQLLESGGGLVQPGGSLRLSCAASGFTFSSYTMSWVRQAPGKGLEWVSAISGSGGSIY |
| | | YADSVKGRFTISRDNSKNTLYLQMNSLRAEDTAVYYCAHRPSLQWLDWWFDPWGQG |
| | | TLVTVSS |
| 1-29 | 2955 | EVQLLESGGGLVQPGGSLRLSCAASGFTFSSQAMSWVRQAPGKGLEWVSIISGSGGSTY |
| | | YADSVKGRFTISRDNSKNTLYLQMNSLRAEDTAVYYCAKDGASGWPNWHFDLWGQG |
| | | TLVTVSS |
| 1-30 | 2956 | EVQLLESGGGLVQPGGSLRLSCAASGFTFSSYPMSWVRQAPGKGLEWVSAISGSGGRT |
| | | YYADSVKGRFTISRDNSKNTLYLQMNSLRAEDTAVYYCAKGAAAGPFDYWGQGTLV |
| | | TVSS |
| 1-31 | 2957 | EVQLLESGGGLVQPGGSLRLSCAASGFTFSSYAMTWVRQAPGKGLEWVSAISGGTTYY |
| | | ADSVKGRFTISRDNSKNTLYLQMNSLRAEDTAVYYCAKEEYYYDSSGPNWFDPWGQG |
| | | TLVTVSS |
| 1-32 | 2958 | EVQLLESGGGLVQPGGSLRLSCAASGFTFSSYAMSWVRQAPGKGLEWVTAISVSGGST |
| | | YYADSVKGRFTISRDNSKNTLYLQNSLKTQETAGYYWAPQGGTTVPTGRFDPWGQRT |
| | | LVTVSS |
| 1-33 | 2959 | EVQLLESGGGLVQPGGSLRLSCAASGFTFSSYAMSWVRQAPGKGLEWVSAISGSSGST |
| | | YYADSVKGRFTISRDNSKNTLYLQMNSLRAEDTAVYYCSRGGGPAAGFHGLDVWGQ |
| | | GTLVTVSS |
| 1-34 | 2960 | EVQLLESGGGLVQPGGSLRLSCAASGFTFSSYAVSWVRQAPGKGLEWVSAISASGGST |
| | | YYADSVKGRFTISRDNSKNTLYLQMNSLRAEDTAVYYCARAAKRQQLFPRNYFDYWG |
| | | QGTLVTVSS |
| 1-35 | 2961 | EVQLLESGGGLVQPGGSLRLSCAASGFTFSSYPMSWVRQAPGKGLEWVSAIRGSGGST |
| | | YYADSVKGRFTISRDNSKNTLYLQMNSLRAEDTAVYYCALHYGSGRSFDYWGQGTLV |
| | | TVSS |
| 1-36 | 2962 | EVQLLESGGGLVQPGGSLRLSCAASGFTFSSYGMSWVRQAPGKGLEWVSAISGSGGAT |
| | | YYADSVKGRFTISRDNSKNTLYLQMNSLRAEDTAVYYCARPGGRIVGALWGAFDYW |
| | | GQGTLVTVSS |
| 3-1 | 2963 | EVQLVESGGGLVQPGGSLRLSCAASGRTFCRYSMGWFRQAPGKERELVATWRPANTN |
| | | YADSVKGRFTISADNSKNTAYLQMNSLKPEDTAVYYCAKNWGDAGTTWFEKSGWGQ |
| | | GTLVTSS |
| 3-2 | 2964 | EVQLVESGGGLVQPGGSLRLSCAASGNIFSRYIMGWFRQAPGKERELVAAISRTGGSTY |
| | | YADSVKGRFTISADNSKNTAYLQMNSLKPEDTAVYYCAIDPDGEWGQGTLVTVSS |
| 3-3 | 2965 | EVQLVESGGGLVQPGGSLRLSCAASGRTLAGYTMGWFRQAPGKERELLAEIYPSGNGV |
| | | YYADSVKGRFTISADNSKNTAYLQMNSLKPEDTAVYYCAADVRDSIWRSWGQGTLVT |
| | | VSS |
| 3-4 | 2966 | EVQLVESGGGLVQPGGSLRLSCAASGSTLSRYSMGWFRQAPGKEREFVAAIARRERVY |
| | | ADSVKGRFTISADNSKNTAYLQMNSLKPEDTAVYYCARLSCHDYSCYSAFDFWGQGT |
| | | LVTVSS |
| 3-5 | 2967 | EVQLVESGGGLVQPGGSLRLSCAASGSIFSSAAMGWFRQAPGKEREFEAISWRTGTTY |
| | | YADSVKGRFTISADNSKNTAYLQMNSLKPEDTAVYYCAAAGSMGWNHLRDYDWGQ |
| | | GTLVT |
| 3-6 | 2968 | EVQLVESGGGLVQPGGSLRLSCAATFSGYLMGWFRQAPGKEREFVAGIWRSGVSLYY |
| | | ADSVKGRFTISADNSKNTAYLQMNSLKPEDTAVYYCAARSGWGAAMRSADFRWGQG |
| | | TLVTVSS |
| 3-7 | 2969 | EVQLVESGGGLVQPGGSLRLSCAASGRTFSSYDMGWFRQAPGKERERVAIIKSDGSTY |
| | | YADSVKGRFTISADNSKNTAYLQMNSLKPEDTAVYYCARSPRFSGVVVRPGLDLWGQ |
| | | GTLVTVSS |
| 3-8 | 2970 | EVQLVESGGGLVQPGGSLRLSCAASGSISSYFMGWFRQAPGKEREWVSSIGIAGTPTLY |
| | | ADSVKGRFTISADNSKNTAYLQMNSLKPEDTAVYYCAACSDYYCSGVGAVWGQGTL |
| | | VTVSS |
| 3-9 | 2971 | EVQLVESGGGLVQPGGSLRLSCAASGPTFSTYAMGWFRQAPGKEREFVAAVINGGTTN |
| | | YADSVKGRFTISADNSKNTAYLQMNSLKPEDTAVYYCAKDSWDSSGYSYHYYYYGM |
| | | DVWGQGTLVTVSS |
| 3-10 | 2972 | EVQLVESGGGLVQPGGSLRLSCAASGIIGSFRTMGWFRQAPGKERELAGFTGSGRSQY |
| | | YADSVKGRFTISADNSKNTAYLQMNSLKPEDTAVYYCARGDIAVIQVLDYWGQGTLV |
| | | TVSS |
| 3-11 | 2973 | EVQLVESGGGLVQPGGSLRLSCAASGGTFASYGMGWFRQAPGKEREWVAGIWEDSSA |
| | | AHYAESVKGRFTISADNSKNTAYLQMNSLKPEDTAVYYCAYSGIGTDWGQGTLVTVS |
| | | S |
| 3-12 | 2974 | EVQLVESGGGLVQPGGSLRLSCAASGLTFRNYAMGWFRQAPGKERELVAGITSGGTR |
| | | NYADSVKGRFTISADNSKNTAYLQMNSLKPEDTAVYYCAAGWGDSAWGQGTLVTVS |
| | | S |
| 3-13 | 2975 | EVQLVESGGGLVQPGGSLRLSCAASGSISTINVMGWFRQAPGKEREFVAAISWGGGLT |
| | | VYADSVKGRFTISADNSKNTAYLQMNSLKPEDTAVYYCAAFDGYTGSDWGQGTLVT |
| | | VSS |
| 3-14 | 2976 | EVQLVESGGGLVQPGGSLRLSCAASGGTLSSYIGWFRQAPGKERELVATVRSGSITNYA |
| | | DSVKGRFTISADNSKNTAYLQMNSLKPEDTAVYYCAADLTDIWEGIREYDEYAWGQG |
| | | TLVTVSS |
| 3-15 | 2977 | EVQLVESGGGLVQPGGSLRLSCAASGRTFRRYPMGWFRQAPGKEREFVVAVTWSGGS |
| | | TYYADSVKGRFTISADNSKNTAYLQMNSLKPEDTAVYYCAAGLRGRQYSWGQGTLVT |
| | | VSS |
| 3-16 | 2978 | EVQLVESGGGLVQPGGSLRLSCAASGSTFSIDVMGWFRQAPGKEREFVAAISWSGESTL |
| | | YADSVKGRFTISADNSKNTAYLQMNSLKPEDTAVYYCAAFDGYSGSDWGQGTLVTVS |
| | | S |
| 3-17 | 2979 | EVQLVESGGGLVQPGGSLRLSCAASGRTSSSAVMGWFRQAPGKEREFVAAINRGGSTI |
| | | YVDSVKGRFTISADNSKNTAYLQMNSLKPEDTAVYYCATGPYRSYFARSYLWGQGTL |
| | | VTVSS |
| 3-18 | 2980 | EVQLVESGGGLVQPGGSLRLSCAASGGTFSSYRMGWFRQAPGKEREWVSAISWNDGG |
| | | ADYADSVKGRFTISADNSKNTAYLQMNSLKPEDTAVYYCAATQWGSSGWKQARWY |
| | | DWGQGTLVTVSS |
| 3-19 | 2981 | EVQLVESGGGLVQPGGSLRLSCAASGTIFASAMGWFRQAPGKERELVAFSSSGGSTYY |
| | | ADSVKGRFTISADNSKNTAYLQMNSLKPEDTAVYYCAKDPIAAADPGDSVSFDYWGQ |
| | | GTLVTVSS |
| 3-20 | 2982 | EVQLVESGGGLVQPGGSLRLSCAASGFGIDAMGWFRQAPGKEREFVATITEGGATNVG |
| | | STSYSVKGRFTISADNSKNTAYLQMNSLKPEDTAVYYCALNVWRTSSDWGQGTLVTV |
| | | SS |
| 3-21 | 2983 | EVQLVESGGGLVQPGGSLRLSCAASGNIIGGNHMGWFRQAPGKEREFVGAITSSRSTV |
| | | YADSVKGRFTISADNSKNTAYLQMNSLKPEDTAVYYCAAVTTQTYGYDWGQGTLVT |
| | | VSS |
| 3-22 | 2984 | EVQLVESGGGLVQPGGSLRLSCAASGRTFSRYDMGWFRQAPGKEREFVGGTRSGSTN |
| | | YADSVKGRFTISADNSKNTAYLQMNSLKPEDTAVYYCARHSDYSGLSNFDYWGQGTL |
| | | VTVSS |
| 3-23 | 2985 | EVQLVESGGGLVQPGGSLRLSCAAGRQPAPELRGYGMGWFRQAPGKEREFVAAVIGS |
| | | SGTTYYADSVKGRFTISADNSKNTAYLQMNSLKPEDTAVYYCAKAKATVGLRAPFDY |
| | | WGQGTLVTVSS |
| 3-24 | 2986 | EVQLVESGGGLVQPGGSLRLSCAASGINFSRYGMGWFRQAPGKEREFVASITYLGRTN |
| | | YADSVKGRFTISADNSKNTAYLQMNSLKPEDTAVYYCALRVRPYGQYDWGQGTLVT |
| | | VSS |
| 3-25 | 2987 | EVQLVESGGGLVQPGGSLRLSCAASGRTFRRYAMGWFRQAPGKEREFVAAINWSGAR |
| | | TYYADSVKGRFTISADNSKNTAYLQMNSLKPEDTAVYYCAVSKPLNYYTYYDARRYD |
| | | WGQGTLVTVSS |
| 3-26 | 2988 | EVQLVESGGGLVQPGGSLRLSCAASGGTFGHYAMGWFRQAPGKEREFVAAVSWSGSS |
| | | TYYADSVKGRFTISADNSKNTAYLQMNSLKPEDTAVYYCAVSQPLNYYTYYDARRYD |
| | | WGQGTLVTVSS |
| 3-27 | 2989 | EVQLVESGGGLVQPGGSLRLSCAASGFTLDDYAMGWFRQAPGKEREFVAAISWSTGST |
| | | YYADSVKGRFTISADNSKNTAYLQMNSLKPEDTAVYYCAASQAPITIATMMKPFYDW |
| | | GQGTLVTVS |
| 3-28 | 2990 | EVQLVESGGGLVQPGGSLRLSCAASGFTFRRYDMGWFRQAPGKEREFVSAISGGLAYY |
| | | ADSVKGRFTISADNSKNTAYLQMNSLKPEDTAVYYCAVDLSGDAVYDWGQGTLVTV |
| | | SS |
| 3-29 | 2991 | EVQLVESGGGLVQPGGSLRLSCAASGINFSRNAMGWFRQAPGKERELVASITHQDRPIY |
| | | ADSEKGLFTITEDNKKNTDHLMMNLLKPEDTAVYYCALPVGPYGQYDWGQGTLVTW |
| | | S |
| 3-30 | 2992 | EVQLVESGGGLVQPGGSLRLSCAASGRTFTTYGMGWFRQAPGKEREFVASITYLGRTY |
| | | YADSVKGRFTISADNSKNTAYLQMNSLKPEDTAVYYCALRVRPYGQYDWGQGTLVT |
| | | VSS |
| 3-31 | 2993 | EVQLVESGGGLVQPGGSLRLSCAASGSTFSINAMGWFRQAPGKEREFVAGITSSGGYT |
| | | NYADSVKGRFTISADNSKNTAYLQMNSLKPEDTAVYYCAADGVPEYSDYASGPVWG |
| | | QGTLVTVSS |
| 7-1 | 2994 | EVQLLESGGGLVQPGGSLRLSCAASGFTFSNYAMRWVRQAPGKGLEWVSAISGSGGST |
| | | YYADSVRGRFTISRDNSKNTLYLQMNSLRAEDTAVYYCARHTGRYSSGSTGWFHYWG |
| | | QGTLVTVSS |
| 7-2 | 2995 | EVQLVESGGGLVQPGGSLRLSCAASGFAFSRHAMSWFRQAPGKEREFVSDIGGSGSTT |
| | | YYADSVKGRFTISADNSKNTAYLQMNSLKPEDTAVYYCARHTDNWFDPWGQGTLVT |
| | | VSS |
| 7-3 | 2996 | EVQLVESGGGLVQPGGSLRLSCAASGRTFSINAMGWFRQAPGKEREFVAGITRSAVSTI |
| | | TSEGTANYADSVKGRFTISADNSKNTAYLQMNSLKPEDTAVYYCAADGVPEYSDYAS |
| | | GPVWGQGTLVTVSS |
| 7-4 | 2997 | EVQLLESGGGLVQPGESLRLSCAASGFTFSSYGMNWVRQAPGKGLEWVSASSGSGGST |
| | | YYADSVKGRFTISRDNSKNTLYLQMNSLRAEDTAYYCARREYIESGFDSWGQGTLVTV |
| | | SS |
| 7-5 | 2998 | EVQLVESGGGLVQPGGSLRLSCAASGRTFSTDAMGWFRQAPGKEREFVAAISSGGSTN |
| | | YADSVKGRFTISADNSKNTAYLQMNSLKPEDTAVYYCAATRGRSTRLVLPSLVEWGQ |
| | | GTLVTVSS |
| 7-6 | 2999 | EVQLVESGGGLVQPGGSLRLSCAASGRIFYPMGWFRQAPGKEREFVAAVRWSSTGIYY |
| | | TQYADSVKGRFTISADNSKNTAYLQMNSLKPEDTAVYYCAAALSEVWRGSENLREGY |
| | | DWGQGTLVTVSS |
| 7-7 | 3000 | EVQLVESGGGLVQPGGSLRLSCAASGFTFGSYDMGWFRQAPGKEREFVTAINWSGAR |
| | | TAYADSVKGRFTISADNSKNTAYLQMNSLKPEDTAVYYCAARSVYSYEYNWGQGTLV |
| | | TVSS |
| 7-8 | 3001 | EVQLVESGGGLVQPGGSLRLSCAASGSTFTINAMGWFRQAPGKEREFVSGISHNGGTT |
| | | NYADSVKGRFTISADNSKNTAYLQMNSLKPEDTAVYYCAADGVPEYSDYASGPVWG |
| | | QGTLVTVSS |
| 7-9 | 3002 | EVQLVESGGGLVQPGGSLRLSCAASGGTFSSIGMGWFRQAPGKEREFVAAISWDGGAT |
| | | AYADSVKGRFTISADNSKNTAYLQMNSLKPEDTAVYYCAKEDVGKPFDWGQGTLVT |
| | | VSS |
| 7-10 | 3003 | EVQLVESGGGLVQPGGSLRLSCAASGRTYAMGWFRQAPGKEREFVAEINWSGSSTYY |
| | | ADSVKGRFTISADNSKNTAYLQMNSLKPEDTAVYYCAVDGPFGWGQGTLVTVSS |
| 7-11 | 3004 | EVQLVESGGGLVQPGGSLRLSCAASGLPFSTKSMGWFRQAPGKEREFVAAIHWSGLTS |
| | | YADSVKGRFTISADNSKNTAYLQMNSLKPEDTAVYYCAADRAADFFAQRDEYDWGQ |
| | | GTLVTVSS |
| 7-12 | 3005 | EVQLVESGGGLVQPGGSLRLSCAASGRTIVPYTMGWFRQAPGKEREFVAAISPSAFTEY |
| | | ADSVKGRFTISADNSKNTAYLQMNSLKPEDTAVYYCAARRWGYDWGQGTLVTVSS |
| 7-13 | 3006 | EVQLVESGGGLVQPGGSLRLSCAASGLRLNMHRMGWFRQAPGKEREFVAAISGWSGG |
| | | TNYADSVKGRFTISADNSKNTAYLQMNSLKPEDTAVYYCAKIGTLWWGQGTLVTVSS |
| 7-14 | 3007 | EVQLVESGGGLVQPGGSLRLSCAASGSTFSINAMGWFRQAPGKEREFVAGISRGGTTN |
| | | YADSVKGRFTISADNSKNTAYLQMNSLKPEDTAVYYCAADGVPEYSDYASGPVWGQ |
| | | GTLVTVSS |
| 7-15 | 3008 | EVQLVESGGGLVQPGGSLRLSCAASGSTLPYHAMGWFRQAPGKEREFVASISRFFGTA |
| | | YYADSVKGRFTISADNSKNTAYLQMNSLKPEDTAVYYCAPTFAAGASEYHWGQGTLV |
| | | TVSS |
| 7-16 | 3009 | EVQLVESGGGLVQPGGSLRLSCAASGFTFTSYAISWFRQAPGKEREFVSAISGSGGSTD |
| | | YADSVKGRFTISADNSKNTAYLQMNSLKPEDTAVYYCARGAYGSGTYDYWGQGTLV |
| | | TVSS |
| 7-17 | 3010 | EVQLVESGGGLVQPGGSLRLSCAASGFSLDYYGMGWFRQAPGKEREFVAAITSGGTPH |
| | | YADSVKGRFTISADNSKNTAYLQMNSLKPEDTAVYYCASAYNPGIGYDWGQGTLVTV |
| | | SS |
| 7-18 | 3011 | EVQLVESGGGLVQPGGSLRLSCAASGLTDRRYTMGWFRQAPGKEREFVASITLGGSTA |
| | | YADSVKGRFTISADNSKNTAYLQMNSLKPEDTAVYYCAKEDVGKPFDWGQGTLVTVS |
| | | S |
| 7-19 | 3012 | EVQLVESGGGLVQPGGSLRLSCAASGRTFRRYTMGWFRQAPGKEREFVASITSSGVNA |
| | | YADSVKGRFTISADNSKNTAYLQMNSLKPEDTAVYYCAKEDVGKPFDWGQGTLVTVS |
| | | S |
| 7-20 | 3013 | EVQLVESGGGLVQPGGSLRLSCAASGPTFSIYAMGWFRQAPGKEREFVAGISWNGGST |
| | | NYADSVKGRFTISADNSKNTAYLQMNSLKPEDTAVYYCALRRRFGGQEWGQGTLVTV |
| | | SS |
| 7-21 | 3014 | EVQLVESGGGLVQPGGSLRLSCAASGRTISRYTMGWFRQAPGKEREFVASITSGGSTAY |
| | | ADSVKGRFTISADNSKNTAYLQMNSLKPEDTAVYYCAKEDVGKPFDWGQGTLVTVSS |
| 7-22 | 3015 | EVQLVESGGGLVQPGGSLRLSCAASGRTITRYTMGWFRQAPGKEREFVASITSGGSTA |
| | | YADSVKGRFTISADNSKNTAYLQMNSLKPEDTAVYYCAKQDVGKPFDWGQGTLVTVS |
| | | S |
| 7-23 | 3016 | EVQLVESGGGLVQPGGSLRLSCAASGFTFENHAMGWFRQAPGKEREFVAEIYPSGSTIY |
| | | ADSVKGRFTISADNSKNTAYLQMNSLKPEDTAVYYCAARILSRNWGQGTLVTVSS |
| 7-24 | 3017 | EVQLVESGGGLVQPGGSLRLSCAASGFTFSRHAMNWFRQAPGKEREFVSTITGSGGST |
| | | NYADSVKGRFTISADNSKNTAYLQMNSLKPEDTAVYYCAREVGLYYYGSGSSSRRLL |
| | | GRIDYYFDYWGQGTLVTVSS |
| 7-25 | 3018 | EVQLVESGGGLVQPGGSLRLSCAASGFTFDDYSMGWFRQAPGKEREFVASIEWDGSTY |
| | | YADSVKGRFTISADNSKNTAYLQMNSLKPEDTAVYYCAAFDGYTGSDWGQGTLVTVS |
| | | S |
| 7-26 | 3019 | EVQLVESGGGLVQPGGSLRLSCAASGSTFSINAMGWFRQAPGKEREFVAGITSSGGYT |
| | | NYADSVKGRFTISADNSKNTAYLQMNSLKPEDTAVYYCAADGVPEYSDYASGPVWG |
| | | QGTLVTVSS |
| 7-27 | 3020 | EVQLVESGGGLVQPGGSLRLSCAASGQTFNMGWFRQAPGKEREFVAEINWSGSSTYY |
| | | ADSVKGRFTISADNSKNTAYLQMNSLKPEDTAVYYCAVDGPFGWGQGTLVTVSS |
| 7-28 | 3021 | EVQLVESGGGLVQPGGSLRLSCAASGNTFSDNPMGWFRQAPGKEREFVAILAWDSGST |
| | | YYADSVKGRFTISADNSKNTAYLQMNSLKPEDTAVYYCTTDYSKLAITKLSYWGQGT |
| | | LVT |
| 7-29 | 3022 | EVQLVESGGGLVQPGGSLRLSCAASGRTHSIYPMGWFRQAPGKEREFVASITSYGDTN |
| | | YADSVKGRFTISADNSKNTAYLQMNSLKPEDTAVYYCAARRWIPPGPIWGQGTLVTVS |
| | | S |
| 7-30 | 3023 | EVQLVESGGGLVQPGGSLRLSCAASGRTFSMHAMGWFRQAPGKEREFVASISSQGRTN |
| | | YADSVKGRFTISADNSKNTAYLQMNSLKPEDTAVYYCAAEVRNGSDYLPIDWGQGTL |
| | | VTVSS |
| 7-31 | 3024 | EVQLVESGGGLVQPGGSLRLSCAASGFTFSNYSMGWFRQAPGKEREFVAAIHWNGDS |
| | | TAYADSVKGRFTISADNSKNTAYLQMNSLKPEDTAVYYCAAQTEDSAQYIWGQGTLV |
| | | TVSS |
| 7-32 | 3025 | EVQLVESGGGLVQPGGSLRLSCAASGSTFSVNAMGWFRQAPGKEREFVAGVTRGGYT |
| | | NYADSVKGRFTISADNSKNTAYLQMNSLKPEDTAVYYCAADGVPEYSDYASGPVWG |
| | | QGTLVTVSS |
| 7-33 | 3026 | EVQLVESGGGLVQPGGSLRLSCAASGSIGSINAMGWFRQAPGKEREFVAGISNGGTTN |
| | | YADSVKGRFTISADNSKNTAYLQMNSLKPEDTAVYYCAADGVPEYSDYASGPVWGQ |
| | | GTLVTVSS |
| 7-34 | 3027 | EVQLVESGGGLVQPGGSLRLSCAASGRTFGSYDMGWFRQAPGKEREFVAFIHRSGGST |
| | | YYADSVKGRFTISADNSKNTAYLQMNSLKPEDTAVYYCATFPAIVTDSDYDLGNDWG |
| | | QGTLVTVSS |
| 7-35 | 3028 | EVQLVESGGGLVQPGGSLRLSCAASGGTFGHYAMGWFRQAPGKEREFVAAVSWSGSS |
| | | TYYADSVKGRFTISADNSKNTAYLQMNSLKPEDTAVYYCAVSQPLNYYTYYDARRYD |
| | | WGQGTLVTVSS |
| 7-36 | 3029 | EVQLVESGGGLVQPGGSLRLSCAASGFGFGSYDMGWFRQAPGKEREFVTAINWSGAR |
| | | AYYADSVKGRFTISADNSKNTAYLQMNSLKPEDTAVYYCAARSVYSYDYNWGQGTL |
| | | VTVSS |
| 7-37 | 3030 | EVQLVESGGGLVQPGGSLRLSCAASGSTLSINAMGWFRQAPGKEREFVAGITRSGSVT |
| | | NYADSVKGRFTISADNSKNTAYLQMNSLKPEDTAVYYCAADGVPEYSDYASGPVWG |
| | | QGTLVTVSS |
| 7-38 | 3031 | EVQLVESGGGLVQPGGSLRLSCAASGRPFSEYTMGWFRQAPGKEREFVSSIHWGGRGT |
| | | NYADSVKGRFTISADNSKNTAYLQMNSLKPEDTAVYYCAAELHSSDYTSPGAYAWGQ |
| | | GTLVTVSS |
| 7-39 | 3032 | EVQLVESGGGLVQPGGSLRLSCAASGRTFSNYPMGWFRQAPGKEREFVAAITWSGDST |
| | | NYADSVKGRFTISADNSKNTAYLQMNSLKPEDTAVYYCALPSNIITTDYLRVYWGQGT |
| | | LVTVSS |
| 7-40 | 3033 | EVQLVESGGGLVQPGGSLRLSCAASGRTFRRYTMGWFRQAPGKEREFVASITKFGSTN |
| | | YADSVKGRFTISADNSKNTAYLQMNSLKPEDTAVYYCAKEDVGKPFDWGQGTLVTVS |
| | | S |
| 7-41 | 3034 | EVQLVESGGGLVQPGGSLRLSCAASGRTFSTYVMGWFRQAPGKEREFVASISSRGITHY |
| | | ADSVKGRFTISADNSKNTAYLQMNSLKPEDTAVYYCAKEDVGKPFDWGQGTLVTVSS |
| 7-42 | 3035 | EVQLVESGGGLVQPGGSLRLSCAASGFTLDYYGMGWFRQAPGKEREFVAAITSGGTPH |
| | | YGDSVKGRFTISADNSKNTAYLQMNSLKPEDTAVYYCASAYNPGIGYDWGQGTLVTV |
| | | SS |
| 7-43 | 3036 | EVQLVESGGGLVQPGGSLRLSCAASGFTFGHYAMGWFRQAPGKEREFVAAVSWSGST |
| | | TYYADSVKGRFTISADNSKNTAYLQMNSLKPEDTAVYYCAVSHPLNYYTYYDARRYD |
| | | WGQGTLVTVSS |
| 7-44 | 3037 | EVQLVESGGGLVQPGGSLRLSCAASGFTFEDYAMGWFRQAPGKEREGVAAITRGSNTT |
| | | DYADSVKGRFTISADNSKNTAYLQMNSLKPKDTAVYYCAARRWMGGSYFDPGNYDW |
| | | GQGTLVTVSS |
| 7-45 | 3038 | EVQLVESGGGLVQPGGSLRLSCAASGRTLSRYTMGWFRQAPGKEREFVASITSGGSTN |
| | | YADSVKGRFTISADNSKNTAYLQMNSLKPEDTAVYYCAKEDVGKPFDWGQGTLVTVS |
| | | S |
| 8-1 | 3039 | EVQLVESGGGLVQPGGSLRLSCAASGRTFASYAMGWFRQAPGKEREFVGAISRSGDST |
| | | YYADSVKGRFTISADNSKNTAYLQMNSLKPEDTAVYYCARAPFYCTTTKCQDNYYYM |
| | | DVWGQGTLVTVSS |
| 8-2 | 3040 | EVQLVESGGGLVQPGGSLRLSCAASGGTYHAMGWFRQAPGKEREFVAGITSDDRTNY |
| | | ADSVKGRFTISADNSKNTAYLQMNSLKPEDTAVYYCARERRYYDSSGYPYYFDYWGQ |
| | | GTLVTVSS |
| 8-3 | 3041 | EVQLVESGGGLVQPGGSLRLSCAASGTTLDYYAMGWFRQAPGKEREFVAAISWSGGS |
| | | TAYADSVKGRFTISADNSKNTAYLQMNSLKPEDTAVYYCAREDYYDSSGYSWGQGTL |
| | | VTVSS |
| 8-4 | 3042 | EVQLVESGGGLVQPGGSLRLSCAASGGTLSRSRMGWFRQAPGKEREFVAFIGSDTLYA |
| | | DSVKGRFTISADNSKNTAYLQMNSLKPEDTAVYYCANLAYYDSSGYYDYWGQGTLV |
| | | TVSS |
| 8-5 | 3043 | EVQLVESGGGLVQPGGSLRLSCAASGGTFSFYNMGWFRQAPGKEREFVAFISGNGGTS |
| | | YADSVKGRFTISADNSKNTAYLQMNSLKPEDTAVYYCAVVAMRMVTTEGPDVLDVW |
| | | GQGTLVTVSS |
| 8-6 | 3044 | EVQLVESGGGLVQPGGSLRLSCAASGFTFDYYAMGWFRQAPGKEREFVSAIDSEGRTS |
| | | YADSVKGRFTISADNSKNTAYLQMNSLKPEDTAVYYCARWGPFDIWGQGTLVTVSS |
| 8-7 | 3045 | EVQLVESGGGLVQPGGSLRLSCAASGFPFSIWPMGWFRQAPGKEREFVAAVRWSSTGI |
| | | YYTQYADSVKGRFTISADNSKNTAYLQMNSLKPEDTAVYYCTRSEYSSGWYDYWGQ |
| | | GTLVTVSS |
| 8-8 | 3046 | EVQLVESGGGLVQPGGSLRLSCAASGFAESSSMGWFRQAPGKEREFVAAISWSGDITIY |
| | | ADSVKGRFTISADNSKNTAYLQMNSLKPEDTAVYYCARGAPYFDHGSKSYRLFYFDY |
| | | WGQGTLVTVSS |
| 8-9 | 3047 | EVQLVESGGGLVQPGGSLRLSCAASGFTFGTTTMGWFRQAPGKEREFVAAISWSTGIA |
| | | HYADSVKGRFTISADNSKNTAYLQMNSLKPEDTAVYYCARGGPNYYASGRYPWFDP |
| | | WGQGTLVTVSS |
| 8-10 | 3048 | EVQLVESGGGLVQPGGSLRLSCAASGFIGNYHAMGWFRQAPGKEREFVAAVTWSGGT |
| | | TNYADSVKGRFTISADNSKNTAYLQMNSLKPEDTAVYYCAREGYYYDSSGYPYYFDY |
| | | WGQGTLVTVSS |
| 2A-1 | 3049 | EVQLLESGGGLVQPGGSLRLSCAASGFTFSNYATDWVRQAPGKGLEWVSIISGSGGAT |
| | | YYADSVKGRFTISRDNSKNTLYLQMNSLRAEDTAVYYCAKGGYCSSDTCWWEYWLD |
| | | PWGQGTLVTVSS |
| 2A-10 | 3050 | EVQLLESGGGLVQPGGSLRLSCAASGFTFSAFAMGWVRQAPGKGLEWVSAITASGDIT |
| | | YYADSVKGRFTISRDNSKNTLYLQMNSLRAEDTAVYYCARQSDGLPSPWHFDLGGQG |
| | | TLVTVSS |
| 2A-5 | 3051 | EVQLLESGGGLVQPGGSLRLSCAASGFTFSDFAMAWVRQAPGKGLEWVSAISGSGDIT |
| | | YYADSVKGRFTISRDNSKNTLYLQMNSLRAEDTAVYYCAREADGLHSPWHFDLWGQ |
| | | GTLVTVSS |
| 2A-2 | 3052 | EVQLLESGGGLVQPGGSLRLSCAASGFTFSRHAMNWVRQAPGKGLEWVSGISGSGDET |
| | | YYADSVKGRFTISRDNSKNTLYLQMNSLRAEDTAVYYCARDLPASYYDSSGYYWHNG |
| | | MDVWGQGTLVTVSS |
| 2A-4 | 3053 | EVQLLESGGGLVQPGGSLRLSCAASGFTFSDFAMAWVRQAPGKGLEWVSAISGSGDIT |
| | | YYADSVKGRFTISRDNSKNTLYLQMNSLRAEDTAVYYCAREADGLHSPWHFDLWGQ |
| | | GTLVTVSS |
| 2A-6 | 3054 | EVQLLESGGGLVQPGGSLRLSCAASGFTFSNYPMNWVRQAPGKGLEWVSTISGSGGNT |
| | | FYADSVKGRFTISRDNSKNTLYLQMNSLRAEDTAVYYCVRHDEYSFDYWGQGTLVTV |
| | | SS |
| 2A-11 | 3055 | EVQLLESGGGLVQPGGSLRLSCAASGFTFSDFAMAWVRQAPGKGLEWVSAITGSGDIT |
| | | YYADSVKGRFTISRDNSKNTLYLQMNSLRAEDTAVYYCAREADGLHSPWHFDLWGQ |
| | | GTLVTVSS |
| 2A-12 | 3056 | EVQLLESGGGLVQPGGSLRLSCAASGFTFSDYPMNWVRQAPGKGLEWVSTISGSGGIT |
| | | FYADSVKGRFTISRDNSKNTLYLQMNSLRAEDTAVYYCVRHDEYSFDYWGQGTLVTV |
| | | SS |
| 2A-13 | 3057 | EVQLLESGGGLVQPGGSLRLSCAASGFTFSDYPMNWVRQAPGKGLEWVSAISGSGDNT |
| | | YYADSVKGRFTISRDNSKNTLYLQMNSLRAEDTAVYYCVRHDEYSFDYWGQGTLVTV |
| | | SS |
| 2A-14 | 3058 | EVQLLESGGGLVQPGGSLRLSCAASGFTFSDFAMAWVRQAPGKGLEWVSAITGTGDIT |
| | | YYADSVKGRFTISRDNSKNTLYLQMNSLRAEDTAVYYCAREADGLHSPWGQGTLVTV |
| | | SS |
| 2A-7 | 3059 | EVQLLESGGGLVQPGGSLRLSCAASGFTFSDYPMNWVRQAPGKGLEWVSAITGSGDIT |
| | | YYADSVKGRFTISRDNSKNTLYLQMNSLRAEDTAVYYCVRHDEYSFDYWGQGTLVTV |
| | | SS |
| 2A-8 | 3060 | EVQLLESGGGLVQPGGSLRLSCAASGFTFSDFAMAWVRQAPGKGLEWVSAISGSGDIT |
| | | YYADSVKGRFTISRDNSKNTLYLQMNSLRAEDTAVYYCAREADGLHSPWHFDLWGQ |
| | | GTLVTVSS |
| 2A-15 | 3061 | EVQLLESGGGLVQPGGSLRLSCAASGFTFSDFAMAWVRQAPGKGLEWVSAISGSGDIT |
| | | YYADSVKGRFTISRDNSKNTLYLQMNSLRAEDTAVYYCAREADGLHSPWHFDLWGQ |
| | | GTLVTVSS |
| 2A-9 | 3062 | EVQLLESGGGLVQPGGSLRLSCAASGFTFPRYAMSWVRQAPGKGLEWVSTISGSGSTT |
| | | YYADSVKGRFTISRDNSKNTLYLQMNSLRAEDTAVYYCARLIDAFDIWGQGTLVTVSS |
| 2A-21 | 3063 | EVQLLESGGGLVQPGGSLRLSCAASGFTFPRYAMSWVRQAPGKGLEWVSTISGSGSTT |
| | | YYADSVKGRFTISRDNSKNTLYLQMNSLRAEDTAVYYCARLIDAFDIWGQGTLVTVSS |
| 2A-22 | 3064 | EVQLLESGGGLVQPGGSLRLSCAASGFTFTTYALSWVRQAPGKGLEWVSGISGSGDET |
| | | YYADSVKGRFTISRDNSKNTLYLQMNSLRAEDTAVYYCTTGDDFWSGGNWFDPWGQ |
| | | GTLVTVSS |
| 2A-23 | 3065 | EVQLLESGGGLVQPGGSLRLSCAASGFTFSRHAMNWVRQAPGKGLEWVSGITGSGDE |
| | | TYYADSVKGRFTISRDNSKNTLYLQMNSLKAEDTAVYYCARDLPASYYDSSGYYWHN |
| | | GMDVWGQGTLVTVSS |
| 2A-24 | 3066 | EVQLLESGGGLVQPGGSLRLSCAASGFVFSSYAMSWVRQAPGKGLEWVSAISGSGGSS |
| | | YYADSVKGRFTISRDNSKNTLYLQMNSLRAEDTAVYYCARVGGGYWYGIDVWGQGT |
| | | LVTVSS |
| 2A-25 | 3067 | EVQLLESGGGLVQPGGSLRLSCAASGFTLSSYVMSWVRQAPGKGLEWVSGISGGGAST |
| | | YYADSVKGRFTISRDNSKNTLYLQMNSLRAEDTAVYYCARGYSRNWYPSWFDPWGQ |
| | | GTLVTVSS |
| 2A-26 | 3068 | EVQLLESGGGLVQPGGSLRLSCAASGFTFSTYAMSWVRQAPGKGLEWVSSIGGSGSTT |
| | | YYADSVKGRFTISRDNSKNTLYLQMNSLRAEDTAVYYCAGGWYLDYWGQGTLVTVS |
| | | S |
| 2A-27 | 3069 | EVQLLGSGGGLVQPGGSLRLSCAASGFTYSNYAMTWVRQAPGKGLEWVSAISGSSGST |
| | | YYADSVKGRFTISRDNSKNTLYLQMNSLRAEDTAVYYCASLCIVDPFDIWGQGTLVTV |
| | | SS |
| 2A-28 | 3070 | EVQLLESGGGLVQPGGSLRLSCAASGFTFSNYPMNWVRQAPGKGLEWVSTISGSGGNT |
| | | FYADSVKGRFTISRDNSKNTLYLQMNSLRAEDTAVYYCVRHDEYSFDYWGQGTLVTV |
| | | SS |
| 3A-10 | 3071 | EVQLLESGGGLVQPGGSLRLSCAASGFTFRSHAMSWVRQAPGKGLEWVSSISGGGAST |
| | | YYADSVKGRFTISRDNSKNTLYLQMNSLRAEDTAVYYCARVKYLTTSSGWPRPYFDN |
| | | WGQGTLVTVSS |
| 3A-4 | 3072 | EVQLLESGGGLVQPGGSLRLSCAASGFTFSAYSMSWVRQAPGKGLEWVSAISGSGGSR |
| | | YYADSVKGRFTISRDNSKNTLYLQMNSLRAEDTAVYYCGRSKWPQANGAFDIWGQGT |
| | | LVTVSS |
| 3A-7 | 3073 | EVQLLESGGGLVQPGGSLRLSCAASGFMFGNYAMSWVRQAPGKGLEWVAAISGSGGS |
| | | TYYADSVKGRFTISRDNSKNTLYLQMNSLRAEDTAVYYCAKDRGYSSSWYGGFDYW |
| | | GQGTLVTVSS |
| 3A-1 | 3074 | EVQLLESGGGLVQPGGSLRLSCAASGFTFRNHAMAWVRQAPGKGLEWVSGISGSGGT |
| | | TYYGDSVKGRFTISRDNSKNTLYLQMNSLRAEDTAVYYCARGTRFLQWSLPLDVWGQ |
| | | GTLVTVSS |
| 3A-5 | 3075 | EVQLLESGGGLVQPGGSLRLSCAASGFTIPNYAMSWVRQAPGKGLEWVSGISGAGAST |
| | | YYADSVKGRFTISRDNSKNTLYLQMNSLRAEDTAVYYCARHTWWKGAGFFDHWGQG |
| | | TLVTVSS |
| 3A-6 | 3076 | EVQLLESGGGLVQPGGSLRLSCAASGFTFRNYAMAWVRQAPGKGLEWVSGISGSGGT |
| | | TYYGDSVKGRFTISRDNSKNTLYLQMNSLRAEDTAVYYCARGTRFLEWSLPLDVWGQ |
| | | GTLVTVSS |
| 3A-15 | 3077 | EVQLLESGGGLVQPGGSLRLSCAASGFTIRNYAMSWVRQAPGKGLEWVSSISGGGAST |
| | | YYADSVKGRFTISRDNSKNTLYLQMNSLRAEDTAVYYCARVKYLTTSSGWPRPYFDN |
| | | WGQGTLVTVSS |
| 3A-3 | 3078 | EVQLLESGGGLVQPGGSLRLSCAASGFTIPNYAMSWVRQAPGKGLEWVSGISGSGAST |
| | | YYADSVKGRFTISRDNSKNTLYLQMNSLRAEDTAVYYCARHTWWKGAGFFDHWGQG |
| | | TLVTVSS |
| 3A-11 | 3079 | EVQLLESGGGLVQPGGSLRLSCAASGFTITNYAMSWVRQAPGKGLEWVSGISGSGAGT |
| | | YYADSVKGRFTISRDNSKNTLYLQMNSLRAEDTAVYYCARHAWWKGAGFFDHWGQ |
| | | GTLVTVSS |
| 3A-8 | 3080 | EVQLLESGGGLVQPGGSLRLSCAASGFTFRSHAMSWVRQAPGKGLEWVSSISGGGAST |
| | | YYADSVKGRFTISRDNSKNTLYLQMNSLRAEDTAVYYCARVKYLTTSSGWPRPYFDN |
| | | WGQGTLVTVSS |
| 3A-2 | 3081 | EVQLLESGGGLVQPGGSLRLSCAASGFTITNYAMSWVRQAPGKGLEWVSGISGSGAST |
| | | YYADSVKGRFTISRDNSKNTLYLQMNSLRAEDTAVYYCARHTWWKGAGFFDHWGQG |
| | | TLVTVSS |
| 3A-12 | 3082 | EVQLLESGGGLVQPGGSLRLSCAASGFTFRSHAMNWVRQAPGKGLEWVSAISGSGGST |
| | | NYADSVKGRFTISRDNSKNTLYLQMNSLRAEDTAVYYCARGLKFLEWLPSAFDIWGQ |
| | | GTLVTVSS |
| 3A-14 | 3083 | EVQLLESGGGLVQPGGSLRLSCAASGFTFRSHAMSWVRQAPGKGLEWVSSISGGGAST |
| | | YYADSVKGRFTISRDNSKNTLYLQMNSLRAEDTAVYYCARVKYLTTSSGWPRPYFDN |
| | | WGQGTLVTVSS |
| 3A-9 | 3084 | EVQLLESGGGLVQPGGSLRLSCAASGFTFRSYAMSWVRQAPGKGLEWVSSISGGGAST |
| | | YYADSVKGRFTISRDNSKNTLYLQMNSLRAEDTAVYYCARVKYLTTSSGWPRPYFDN |
| | | WGQGTLVTVSS |
| 3A-13 | 3085 | EVQLLESGGGLVQPGGSLRLSCAASGFTITNYAMSWVRQAPGKGLEWVSGISGSGAGT |
| | | YYADSVKGRFTISRDNSKNTLYLQMNSLRAEDTAVYYCARHTWWKGAGFFDHWGQG |
| | | TLVTVSS |
| 3A-16 | 3086 | EVQLLESGGGLVQPGGSLRLSCAASGFTFTNFAMSWVRQAPGKGLEWVSAISGRGGGT |
| | | YYADSVKGRFTISRDNSKNTLYLQMNSLRAEDTAVYYCARDAHGYYYDSSGYDDWG |
| | | QGTLVTVSS |
| 3A-17 | 3087 | EVQLLESGGGLVQPGGSLRLSCAASGFTFRSYPMSWVRQAPGKGLEWVSTISGSGGITY |
| | | YADSVKGRFTISRDNSKNTLYLQMNSLRAEDTAVYYCAKGVYGSTVTTCHWGQGTLV |
| | | TVSS |
| 3A-18 | 3088 | EVQLLESGGGLVQPGGSLRLSCAASGFTLTSYAMSWVRQAPGKGLEWVSAISGSGVDT |
| | | YYADSVKGRFTISRDNSKNTLYLQMNSLRAEDTAVYYCARPTNWGFDYWGQGTLVT |
| | | VSS |
| 3A-19 | 3089 | EVQLLESGGGLVQPGGSLRLSCAASGFTFINYAMSWVRQAPGKGLEWVSTISTSGGNT |
| | | YYADSVKGRFTISRDNSKNTLYLQMNSLRAEDTAVYYCARADSNWASSAYWGQGTL |
| | | VTVSS |
| 3A-2 | 3090 | EVQLLESGGGLVQPGGSLRLSCAASGFPFSTYAMSWVRQAPGKGLEWVSGISVSGGFT |
| | | YYADSVKGRFTISRDNSKNTLYLQMNSLRAEDTAVYYCARDPYSYGYYYYYGMDVW |
| | | GQGTLVTVSS |
| 3A-21 | 3091 | EVQLLESGGGLVQPGGSLRLSCAASGFTFSTYAMGWVRQAPGKGLEWVSGISGGGVS |
| | | TYYADSVKGRFTISRDNSKNTLYLQMNSLRAEDTAVYYCARARNWGPSDYWGQGTL |
| | | VTVSS |
| 3A-22 | 3092 | EVQLLESGGGLVQPGGSLRLSCAASGFIFSDYAMTWVRQAPGKGLEWVSAISGSAFYA |
| | | DSVKGRFTISRDNSKNTLYLQMNSLRAEDTAVYYCARDATYSSSWYNWFDPWGQGTL |
| | | VTVSS |
| 3A-23 | 3093 | EVQLLESGGGLVQPGGSLRLSCAASGFTFSDYAMTWVRQAPGKGLEWVSDISGSGGST |
| | | YYADSVKGRFTISRDNSKNTLYLQMNSLRAEDTAVYYCARGTVTSFDFWGQGTLVTV |
| | | SS |
| 3A-24 | 3094 | EVQLLESGGGLVQPGGSLRLSCAASGFTFSIYAMGWVRQAPGKGLEWVSFISGSGGST |
| | | YYADSVKGRFTISRDNSKNTLYLQMNSLRAEDTAVYYCAKDYHSASWFSAAADYWG |
| | | QGTLVTVSS |
| 3A-25 | 3095 | EVQLLESGGGLVQPGGSLRLSCAASGFTFASYAMTWVRQAPGKGLEWVSAISESGGST |
| | | YYADSVKGRFTISRDNSKNTLYLQMNSLRAEDTAVYYCAREGQEYSSGSSYFDYWGQ |
| | | GTLVTVSS |
| 3A-26 | 3096 | EVQLLESGGGLVQPGGSLRLSCAASGFTFSEYAMSWVRQAPGKGLEWVSAITGSGGST |
| | | YYGDSVKGRFTISRDNSKNTLYLQMNSLRAEDTAVYYCARGSQTPYCGGDCPETFDY |
| | | WGQGTLVTVSS |
| 3A-27 | 3097 | EVQLLESGGGLVQPGGSLRLSCAASGFTFDDYAMSWVRQAPGKGLEWVSGISGGGTS |
| | | TYYADSVKGRFTISRDNSKNTLYLQMNSLRAEDTAVYYCARDLYSSGWYGFDYWGQ |
| | | GTLVTVSS |
| 3A-28 | 3098 | EVQLLESGGGLVQPGGSLRLSCAASGFTFNNYAMNWVRQAPGKGLEWVSAISGSVGS |
| | | TYYADSVKGRFTISRDNSKNTLYLQMNSLRAEDTAVYYCARDNYDFWSGYYTNWFD |
| | | PWGQGTLVTVSS |
| 3A-29 | 3099 | EVQLLESGGGLVQPGGSLRLSCAASGFTFTNHAMSWVRQAPGKGLEWVSAISGSGSNI |
| | | YYADSVKGRFTISRDNSKNTLYLQMNSLRAEDTAVYYCARDSLSVTMGRGVVTYYYY |
| | | GMDFWGQGTLVTVSS |
| 4A-51 | 3100 | EVQLVESGGGLVQPGGSLRLSCAASGPGTAIMGWFRQAPGKEREFVARISTSGGSTKY |
| | | ADSVKGRFTISADNSKNTAYLQMNSLKPEDTAVYYCARTTVTTPPLIWGQGTLVTVSS |
| 4A-52 | 3101 | EVQLVESGGGLVQPGGSLRLSCAASGRSFSNSVMGWFRQAPGKEREFVARITWNGGST |
| | | YYADSVKGRFTISADNSKNTAYLQMNSLKPEDTAVYYCATTENPNPRWGQGTLVTVS |
| | | S |
| 4A-53 | 3102 | EVQLVESGGGLVQPGGSLRLSCAASGRTFGDDTMGWFRQAPGKEREFVAAVSWSGSG |
| | | VYYADSVKGRFTITADNSKNTAYLQMNSLKPENTAVYYCATDPPLFWGQGTLVTVSS |
| 4A-54 | 3103 | EVQLVESGGGLVQPGGSLRLSCAASGRTFSDARMGWFRQAPGKEREFVGAVSWSGGT |
| | | TVYADSVKGRFTISADNSKNTAYLQMNSLKPEDTAVYYCATTEDPYPRWGQGTLVTV |
| | | SS |
| 4A-49 | 3104 | EVQLVESGGGLVQPGGSLRLSCAASGRTFGDYIMGWFRQAPGKERESVAAINWSAGY |
| | | TAYADSVKGRFTISADNSKNTAYLQMNSLKPEDTAVYYCARASPNTGWHFDHWGQG |
| | | TLVTVSS |
| 4A-55 | 3105 | EVQLVESGGGLVQPGGSLRLSCAASGSGLSINAMGWFRQAPGKERESVAAISWSGGST |
| | | YTAYADSVKGRFTISADNSKNTAYLQMNSLKPEDTAVYYCAAYQAGWGDWGQGTLV |
| | | TVSS |
| 4A-39 | 3106 | EVQLVESGGGLVQPGGSLRLSCAASGRTFSNAAMGWFRQAPGKEREFVARILWTGAS |
| | | RNYADSVKGRFTISADNSKNTAYLQMNSLKPEDTAVYYCATTENPNPRWGQGTLVTV |
| | | SS |
| 4A-56 | 3107 | EVQLVESGGGLVQPGGSLRLSCAASGFSLDYYGMGWFRQAPGKERESVAAISWNGDF |
| | | TAYADSVKGRFTISADNSKNTAYLQMNSLKPEDTAVYYCAKRANPTGAYFDYWGQG |
| | | TLVTVSS |
| 4A-33 | 3108 | EVQLVESGGGLVQPGGSLRLSCAASGFTFSRHDMGWFRQAPGKEREFVAGINWESGST |
| | | NYADSVKGRFTISADNSKNTAYLQMNSLKPEDTAVYYCAADRGVYGGRWYRTSQYT |
| | | WGQGTLVTVSS |
| 4A-57 | 3109 | EVQLVESGGGLVQPGGSLRLSCAASGLTFRNYAMGWFRQAPGKEREFVAAIGSGGYT |
| | | DYADSVKGRFTISADNSKNTAYLQMNSLKPEDTAVYYCAVKPGWVARDPSQYNWGQ |
| | | GTLVTVSS |
| 4A-25 | 3110 | EVQLVESGGGLVQPGGSLRLSCAASGGTFSRYAMGWFRQAPGKEREWVSAVDSGGST |
| | | YYADSVKGRFTISADNSKNTAYLQMNSLKPEDTAVYYCAASPSLRSAWQWGQGTLVT |
| | | VSS |
| + | | |
| 4A-58 | 3111 | EVQLVESGGGLVQPGGSLRLSCAASGFTLDYYDMGWFRQAPGKEREFVAAVTWSGGS |
| | | TYYADSVKGRFTISADNSKNTAYLQMNSLKPEDTAVYYCAADRRGLASTRAADYDW |
| | | GQGTLVTVSS |
| 4A-59 | 3112 | EVQLVESGGGLVQPGGSLRLSCAASGRTFGDYIMGWFRQAPGKEREFVAAINWSAGY |
| | | TPYADSVKGRFTISADNSKNTAYLQMNSLKPEDTAVYYCATAPPLFCWHFDLWGQGT |
| | | LVTVSS |
| 4A-6 | 3113 | EVQLVESGGGLVQPGGSLRLSCAASGRTFGDDIMGWFRQAPGKEREFVAAIHWSAGY |
| | | TRYADSVKGRFTISADNSKNTAYLQMNSLKPEDTAVYYCATDPPLFWGHVDLWGQGT |
| | | LVTVSS |
| 4A-61 | 3114 | EVQLVESGGGLVQPGGSLRLSCAASGRTFGDYIMGWFRQAPGKEREIVAAINWSADYT |
| | | PYADSVKGRFTISADNSKNTAYLQMNSLKPEDTAVYYCATAPPNTGWHFDHWGQGTL |
| | | VTVSS |
| 4A-3 | 3115 | EVQLVESGGGLVQPGGSLRLSCAASGRTFGDYIMGWFRQAPGKEREIVAAINWSAGYT |
| | | AYADSVKGRFTISADNSKNTAYLQMNSLKPEDTAVYYCATATPNTGWHFDHWGQGT |
| | | LVTVSS |
| 4A-62 | 3116 | EVQLVESGGGLVQPGGSLRLSCAASGRTFSDDTMGWFRQAPGKEREFVAAINWSGGS |
| | | TDYADSVKGRFTISADNSKNTAYLQMNSLKPEDTAVYYCATDPPLFWGQGTLVTVSS |
| 4A-43 | 3117 | EVQLVESGGGLVQPGGSLRLSCAASGRTFGDDTMGWFRQAPGKEREFVAGINWSGGN |
| | | TYYADSVKGRFTISADNSKNTAYLQMNSLKPEDTAVYYCATDPPLFWGQGTLVTVSS |
| 4A-5 | 3118 | EVQLVESGGGLVQPGGSLRLSCAASGRTFGDYIMGWFRQAPGKEREFVAAINWTGGY |
| | | TSYADSVKGRFTISADNSKNTAYLQMNSLKPEDTAVYYCATDPPLFWGQGTLVTVSS |
| 4A-42 | 3119 | EVQLVESGGGLVQPGGSLRLSCAASGRTFGDDTMGWFRQAPGKERECVAAINWSGGN |
| | | TYYADSVKGRFTISADNSKNTAYLQMNSLKPEDTAVYYCATDPPLFWGQGTLVTVSS |
| 4A-63 | 3120 | EVQLVESGGGLVQPGGSLRLSCAASGRTFSDYTMGWFRQAPGKEREFVAAINWSGGY |
| | | TYYADSVKGRFTISADNSKNTAYLQMNSLKPEDTAVYYCATDPPLFWGQGTLVTVSS |
| 4A-6 | 3121 | EVQLVESGGGLVQPGGSLRLSCAASGRTFGDYGMGWFRQAPGKEREFVATINWSGAL |
| | | THYADSVKGRFTISADNSKNTAYLQMNSLKPEDTAVYYCATLPFYDFWSGYYTGYYY |
| | | MDVWGQGTLVTVSS |
| 4A-40 | 3122 | EVQLVESGGGLVQPGGSLRLSCAASGRTFSDDTMGWFRQAPGKEREFLAGVTWSGSS |
| | | TFYADSVKGRFTISADNSKNTAYLQMNSLKPEDTAVYYCATDPPLFWGQGTLVTVSS |
| 4A-21 | 3123 | EVQLVESGGGLVQPGGSLRLSCAASGRTFSDDIMGWFRQAPGKEREFVAAISWSGGNT |
| | | HYADSVKGRFTISADNSKNTAYLQMNSLKPEDTAVYYCATDPPLFWGQGTLVTVSS |
| 4A-64 | 3124 | EVQLVESGGGLVQPGGSLRLSCAASGRTFGDYIMGWFRQAPGKERESVAAINWSAGY |
| | | TAYADSVKGRFTISADNSKNTAYLQMNSLKPEDTAVYYCATASPNTGWHFDHWGQG |
| | | TLVTVSS |
| 4A-47 | 3125 | EVQLVESGGGLVQPGGSLRLSCAASGFTFDDDYVMGWFRQAPGKEREFVAAVSGSGD |
| | | DTYYADSVKGRFTISADNSKNTAYLQMNSLKPEDTAVYYCAADRRGLASTRAADYD |
| | | WGQGTLVTVSS |
| 4A-65 | 3126 | EVQLVESGGGLVQPGGSLRLSCAASGRTFGDYIMGWFRQAPGKEREFVAAINWSAGY |
| | | TAYADSVKGRFTISADNSKNTAYLQMNSLKPEDTAVYYCATEPPLSCWHFDLWGQGT |
| | | LVTVSS |
| 4A-18 | 3127 | EVQLVESGGGLVQPGGSLRLSCAASGRTFGDYIMGWFRQAPGKEREIVAAINWSGGYT |
| | | PYADSVKGRFTISADNSKNTAYLQMNSLKPEDTAVYYCATAPPNTGWHFDHWGQGTL |
| | | VTVSS |
| 4A-66 | 3128 | EVQLVESGGGLVQPGGSLRLSCAASGRTFGDDTMGWFRQAPGKEREIVAAINWSAGY |
| | | TPYADSVKGRFTISADNSKNTAYLQMNSLKPEDTAVYYCATDPPLFCCHFDLWGQGTL |
| | | VTVSS |
| 4A-36 | 3129 | EVQLVESGGGLVQPGGSLRLSCAASGRTFSDDTMGWFRQAPGKEREFVAAISWSGGTT |
| | | RYADSVKGRFTISADNSKNTAYLQMNSLKPEDTAVYYCATDPPLFWGQGTLVTVSS |
| 4A-67 | 3130 | EVQLVESGGGLVQPGGSLRLSCAASGRTFSDDTMGWFRQAPGKEREFVAAINWSGDS |
| | | TYYADSVKGRFTISADNSKNTAYLQMNSLKPEDTAVYYCATDPPLFWGQGTLVTVSS |
| 4A-16 | 3131 | EVQLVESGGGLVQPGGSLRLSCAASGRTFSDDTMGWFRQAPGKEREFVAAINWSGGT |
| | | TRYADSVKGRFTISADNSKNTAYLQMNSLKPEDTAVYYCATDPPLFWGQGTLVTVSS |
| 4A-11 | 3132 | EVQLVESGGGLVQPGGSLRLSCAASGRTFSDDAMGWFRQAPGKEREFVAAIHWSGSST |
| | | RYADSVKGRFTISADNSKNTAYLQMNSLKPEDTAVYYCATDPPLFWGQGTLVTVSS |
| 4A-68 | 3133 | EVQLVESGGGLVQPGGSLRLSCAASGRTFSDDTMGWFRQAPGKERELVGTINWSGGST |
| | | YYADSVKGRFTISADNSKNTAYLQMNSLKPEDTAVYYCATDPPLFWGQGTLVTVSS |
| 4A-34 | 3134 | EVQLVESGGGLVQPGGSLRLSCAASGRTFGDYIMGWFRQAPGKEREFVAAINWSGGY |
| | | TPYADSVKGRFTISADNSKNTAYLQMNSLKPEDTAVYYCATDPPLFWGQGTLVTVSS |
| 4A-28 | 3135 | EVQLVESGGGLVQPGGSLRLSCAASGRTFGDDTMGWFRQAPGKERELVAAINWNGGN |
| | | THYADSVKGRFTISADNSKNTAYLQMNSLKPEDTAVYYCATDPPLFWGQGTLVTVSS |
| 4A-69 | 3136 | EVQLVESGGGLVQPGGSLRLSCAASGRTFSDDAMGWFRQAPGKEREFVAAINWSGGT |
| | | TRYADSVKGRFTISADNSKNTAYLQMNSLKPEDTAVYYCATDPPLFWGQGTLVTVSS |
| 4A-7 | 3137 | EVQLVESGGGLVQPGGSLRLSCAASGRTFGDYIMGWFRQAPGKERESVAAINWSAGY |
| | | TPYADSVKGRFTISADNSKNTAYLQMNSLKPEDTAVYYCATDPPLFWGHVDLWGQGT |
| | | LVTVSS |
| 4A-71 | 3138 | EVQLVESGGGLVQPGGSLRLSCAASGRTFSDDTMGWFRQAPGKEREWVASINWSGGS |
| | | TYYADSVKGRFTISADNSKNTAYLQMNSLKPEDTAVYYCATDPPLFWGQGTLVTVSS |
| 4A-23 | 3139 | EVQLVESGGGLVQPGGSLRLSCAASGRTFSDDAMGWFRQAPGKEREFVAGISWNGGSI |
| | | YYADSVKGRFTISADNSKNTAYLQMNSLKPEDTAVYYCATDPPLFWGQGTLVTVSS |
| 4A-9 | 3140 | EVQLVESGGGLVQPGGSLRLSCAASGFTFDDYEMGWFRQAPGKEREFVAAISWRGGT |
| | | TYYADSVKGRFTISADNSKNTAYLQMNSLKPEDTAVYYCAADRRGLASTRAGDYDW |
| | | GQGTLVTVSS |
| 4A-72 | 3141 | EVQLVESGGGLVQPGGSLRLSCAASGRTFGDDTMGWFRQAPGKEREFVAAINWSGGY |
| | | TPYADSVKGRFTISADNSKNTAYLQMNSLKPEDTAVYYCATDPPLFWGHVDLWGQGT |
| | | LVTVSS |
| 4A-73 | 3142 | EVQLVESGGGLVQPGGSLRLSCAASGRTFSDDAMGWFRQAPGKEREFVAAINWSGGS |
| | | TRYADSVKGRFTISADNSKNTAYLQMNSLKPEDTAVYYCATDPPLFWGQGTLVTVSS |
| 4A-29 | 3143 | EVQLVESGGGLVQPGGSLRLSCAASGVTLDDYAMGWFRQAPGKEREFVAVINWSGGS |
| | | TDYADSVKGRFTISADNSKNTAYLQMNSLKPEDTAVYYCARGGGWVPSSTSESLNWY |
| | | FDRWGQGTLVTVSS |
| 4A-41 | 3144 | EVQLVESGGGLVQPGGSLRLSCAASGRTFGDYIMGWFRQAPGKERESVAAINWSGGTT |
| | | PYADSVKGRFTISADNSKNTAYLQMNSLKPEDTAVYYCATDPPLFCCHVDLWGQGTL |
| | | VTVSS |
| 4A-74 | 3145 | EVQLVESGGGLVQPGGSLRLSCAASGLTFSDDTMGWFRQAPGKEREFVAAVSWSGGN |
| | | TYYADSVKGRFTISADNSKNTAYLQMNSLKPEDTAVYYCATDPPLFWGQGTLVTVSS |
| 4A-75 | 3146 | EVQLVESGGGLVQPGGSLRLSCAASGRTFGDDTMGWFRQAPGKEREFVAAINWTGGY |
| | | TPYADSVKGRFTISADNSKNTAYLQMNSLKPEDTAVYYCATDPPLFWGQGTLVTVSS |
| 4A-31 | 3147 | EVQLVESGGGLVQPGGSLRLSCAASGRTFGDYIMGWFRQAPGKEREFVATINWTAGY |
| | | TYYADSVKGRFTISADNSKNTAYLQMNSLKPEDTAVYYCATDPPLFCWHFDHWGQGT |
| | | LVTVSS |
| 4A-32 | 3148 | EVQLVESGGGLVQPGGSLRLSCAASGRTFGDDTMGWFRQAPGKEREFVAAINWSGGN |
| | | TDYADSVKGRFTISADNSKNTAYLQMNSLKPEDTAVYYCATDPPLFWGQGTLVTVSS |
| 4A-15 | 3149 | EVQLVESGGGLVQPGGSLRLSCAASGRTFGDYTMGWFRQAPGKEREFVAAINWSGGN |
| | | TYYADSVKGRFTISADNSKNTAYLQMNSLKPEDTAVYYCATDPPLFWGQGTLVTVSS |
| 4A-14 | 3150 | EVQLVESGGGLVQPGGSLRLSCAASGRTFSDDTMGWFRQAPGKEREFVAGINWSGNG |
| | | VYYADSVKGRFTISADNSKNTAYLQMNSLKPEDTAVYYCATDPPLFWGQGTLVTVSS |
| 4A-76 | 3151 | EVQLVESGGGLVQPGGSLRLSCAASGRTFGDYAMGWFRQAPGKERELVAPINWSGGS |
| | | TYYADSVKGRFTISADNSKNTAYLQMNSLKPEDTAVYYCATDPPLFWGQGTLVTVSS |
| 4A-50 | 3152 | EVQLVESGGGLVQPGGSLRLSCAASGGTFSNSGMGWFRQAPGKERELVAVVNWSGRR |
| | | TYYADSVKGRFTISADNSKNTAYLQMNSLKPEDTAVYYCAVPWMDYNRRDWGQGTL |
| | | VTVSS |
| 4A-17 | 3153 | EVQLVESGGGLVQPGGSLRLSCAASGQLANFASYAMGWFRQAPGKEREFVAAITRSGS |
| | | STVYADSVKGRFTISADNSKNTAYLQMNSLKPEDTAVYYCATTMNPNPRWGQGTLVT |
| | | VSS |
| 4A-37 | 3154 | EVQLVESGGGLVQPGGSLRLSCAASGRTFSDDIMGWFRQAPGKEREFVAAINWTGGST |
| | | YYADSVKGRFTISADNSKNTAYLQMNSLKPEDTAVYYCATDPPLFWGQGTLVTVSS |
| 4A-44 | 3155 | EVQLVESGGGLVQPGGSLRLSCAASGRTFGDYIMGWFRQAPGKEREIVAAINWSAGYT |
| | | AYADSVKGRFTISADNSKNTAYLQMNSLKPEDTAVYYCATARPNTGWHFDHWGQGT |
| | | LVTVSS |
| 4A-77 | 3156 | EVQLVESGGGLVQPGGSLRLSCAASGRTFSDDTMGWFRQAPGKEREWVGSINWSGGS |
| | | TYYADSVKGRFTISADNSKNTAYLQMNSLKPEDTAVYYCATDPPLFWGQGTLVTVSS |
| 4A-78 | 3157 | EVQLVESGGGLVQPGGSLRLSCAASGRTFSDDTMGWFRQAPGKEREFVAGMTWSGSS |
| | | TFYADSVKGRFTISADNSKNTAYLQMNSLKPEDTAVYYCATDPPLFWGQGTLVTVSS |
| 4A-79 | 3158 | EVQLVESGGGLVQPGGSLRLSCAASGRTFGDYIMGWFRQAPGKERECVAAINWSGDY |
| | | TDYADSVKGRFTISADNSKNTAYLQMNSLKPEDTAVYYCATDPPLFWGQGTLVTVSS |
| 4A-8 | 3159 | EVQLVESGGGLVQPGGSLRLSCAASGRTFGDYIMGWFRQAPGKEREFVGGINWSGGY |
| | | TYYADSVKGRFTISADNSKNTAYLQMNSLKPEDTAVYYCATDPPLFWGQGTLVTVSS |
| 4A-81 | 3160 | EVQLVESGGGLVQPGGSLRLSCAASGRTFSDDTMGWFRQAPGKEREFVAAVNWSGGS |
| | | TYYADSVKGRFTISADNSKNTAYLQMNSLKPEDTAVYYCATDPPLFWGQGTLVTVSS |
| 4A-82 | 3161 | EVQLVESGGGLVQPGGSLRLSCAASGRTFGDYAMGWFRQAPGKEREFVAAINWSGGY |
| | | TRYADSVKGRFTISADNSKNTAYLQMNSLKPEDTAVYYCATDPPLFWGQGTLVTVSS |
| 4A-83 | 3162 | EVQLVESGGGLVQPGGSLRLSCAASGRTFGDDTMGWFRQAPGKEREFVAAINWSGGY |
| | | TPYADSVKGRFTISADNSKNTAYLQMNSLKPEDTAVYYCATDPPLFWGQGTLVTVSS |
| 4A-35 | 3163 | EVQLVESGGGLVQPGGSLRLSCAASGRTFGDYIMGWFRQAPGKERESVAAINWSAGY |
| | | TAYADSVKGRFTISADNSKNTAYLQMNSLKPEDTAVYYCARASPNTGWHFDRWGQG |
| | | TLVTVSS |
| 4A-45 | 3164 | EVQLVESGGGLVQPGGSLRLSCAASGRTFGDYIMGWFRQAPGKEREFVAAINWSGGY |
| | | THYADSVKGRFTISADNSKNTAYLQMNSLKPEDTAVYYCATDPPLFWGQGTLVTVSS |
| 4A-84 | 3165 | EVQLVESGGGLVQPGGSLRLSCAASGRTFSDDTMGWFRQAPGKEREFVAAITWSGGR |
| | | TRYADSVKGRFTISADNSKNTAYLQMNSLKPEDTAVYYCATDRPLFWGQGTLVTVSS |
| 4A-85 | 3166 | EVQLVESGGGLVQPGGSLRLSCAASGRTFGDYIMGWFRQAPGKERESVAAINWSGGY |
| | | TAYADSVKGRFTISADNSKNTAYLQMNSLKPEDTAVYYCATASPNTGWHFDHWGQG |
| | | TLVTVSS |
| 4A-86 | 3167 | EVQLVESGGGLVQPGGSLRLSCAASGRTFSDDTMGWFRQAPGKEREFVAAIHWSGSST |
| | | RYADSVKGRFTISADNSKNTAYLQMNSLKPEDTAVYYCATDPPLFWGQGTLVTVSS |
| 4A-87 | 3168 | EVQLVESGGGLVQPGGSLRLSCAASGRTFSDYTMGWFRQAPGKEREWVAAINWSGGT |
| | | TYYADSVKGRFTISADNSKNTAYLQMNSLKPEDTAVYYCATDPPLFWGQGTLVTVSS |
| 4A-88 | 3169 | EVQLVESGGGLVQPGGSLRLSCAASGRTFGDDTMGWFRQAPGKEREFVAAINWSGDN |
| | | THYADSVKGRFTISADNSKNTAYLQMNSLKPEDTAVYYCATDPPLFWGQGTLVTVSS |
| 4A-89 | 3170 | EVQLVESGGGLVQPGGSLRLSCAASGFAFGDNWIGWFRQAPGKEREWVASISSGGTTA |
| | | YADNVKGRFTIIADNSKNTAYLQMNSLKPEDTAVYYCAHRGGWLRPWGYWGQGTLV |
| | | TVSS |
| 4A-9 | 3171 | EVQLVESGGGLVQPGGSLRLSCAASGRTFSDDAMGWFRQAPGKEREFVGRINWSGGN |
| | | TYYADSVKGRFTISADNSKNTAYLQMNSLKPEDTAVYYCATDPPLFWGQGTLVTVSS |
| 4A-91 | 3172 | EVQLVESGGGLVQPGGSLRLSCAASGRTFSDDTMGWFRQAPGKEREFVGGISWSGGN |
| | | TYYADSVKGRFTISADNSKNTAYLQMNSLKPEDTAVYYCATDPPLFWGQGTLVTVSS |
| 4A-92 | 3173 | EVQLVESGGGLVQPGGSLRLSCAASGRTFSDDTMGWFRQAPGKEREFVAAINWSGGS |
| | | TYYADSVKGRFTISADNSKNTAYLQMNSLKPEDTAVYYCATDPPLFWGQGTLVTVSS |
| 4A-46 | 3174 | EVQLVESGGGLVQPGGSLRLSCAASGRTFGDDTMGWFRQAPGKEREFVAAINWSGGY |
| | | TYYADSVKGRFTISADNSKNTAYLQMNSLKPEDTAVYYCATDPPLFWGQGTLVTVSS |
| 4A-20 | 3175 | EVQLVESGGGLVQPGGSLRLSCAASGRTFGDYIMGWFRQAPGKEREFVAAINWSADY |
| | | TAYADSVKGRFTISADNSKNTAYLQMNSLKPEDTAVYYCATDPPLFCWHFDHWGQGT |
| | | LVTVSS |
| 4A-93 | 3176 | EVQLVESGGGLVQPGGSLRLSCAASGRTFSDDAMGWFRQAPGKEREFVAAINWSGSST |
| | | YYADSVKGRFTISADNSKNTAYLQMNSLKPEDTAVYYCATDPPLFWGQGTLVTVSS |
| 4A-4 | 3177 | EVQLVESGGGLVQPGGSLRLSCAASGRTFGDYIMGWFRQAPGKEREMVAAINWIAGY |
| | | TADADSVRRLFTITADNNKNTAHLMMNLLKPENTAVYYCAEPSPNTGWHFDHWGQG |
| | | TLVTVSS |
| 4A-2 | 3178 | EVQLVESGGGLVQPGGSLRLSCAASGRTFGDDTMGWFRQAPGKEREFVAAINWSGGN |
| | | TPYADSVKGRFTISADNSKNTAYLQMNSLKPEDTAVYYCATDPPLFWGQGTLVTVSS |
| 4A-94 | 3179 | EVQLVESGGGLVQPGGSLRLSCAASGRTFSDDTMGWFRQAPGKEREFVAAINWSGDN |
| | | THYADSVKGRFTISADNSKNTAYLQMNSLKPEDTAVYYCATDPPLFWGQGTLVTVSS |
| 4A-95 | 3180 | EVQLVESGGGLVQPGGSLRLSCAASGRTFGDYIMGWFRQAPGKEREIVAAINWSAGYT |
| | | AYADSVKGRFTISADNSKNTAYLQMNSLKPEDTAVYYCATAPPLFCWHFDHWGQGTL |
| | | VTVSS |
| 4A-12 | 3181 | EVQLVESGGGLVQPGGSLRLSCAASGFTFGDYVMGWFRQAPGKEREIVAAINWNAGY |
| | | TAYADSVRGLFTITADNSKNTAYLQMNSLKPEDTAVYYCAKASPNTGWHFDHWGQG |
| | | TLVTVSS |
| 4A-30 | 3182 | EVQLVESGGGLVQPGGSLRLSCAASGRTFGDYTMGWFRQAPGKEREFVAAINWTGGY |
| | | TYYADSVKGRFTISADNSKNTAYLQMNSLKPEDTAVYYCATDPPLFWGQGTLVTVSS |
| 4A-27 | 3183 | EVQLVESGGGLVQPGGSLRLSCAASGRTFGDYIMGWFRQAPGKEREIVAAINWSAGYT |
| | | AYADSVKGLFTITADNSKNTAYLQMNILKPEDTAVYYCARATPNTGWHFDHWGQGTL |
| | | VTVSS |
| 4A-22 | 3184 | EVQLVESGGGLVQPGGSLRLSCAASGRTFGDYIMGWFRQAPGKEREFVAAINWSGDN |
| | | THYADSVKGRFTISADNSKNTAYLQMNSLKPEDTAVYYCATDPPLFWGQGTLVTVSS |
| 4A-96 | 3185 | EVQLVESGGGLVQPGGSLRLSCAASGRTFGDYIMGWFRQAPGKEREIVAAINWSAGYT |
| | | PYADSVKGRFTISADNSKNTAYLQMNSLKPEDTAVYYCATDPPLFCCHFDHWGQGTL |
| | | VTVSS |
| 4A-97 | 3186 | EVQLVESGGGLVQPGGSLRLSCAASGRTFGDYIMGWFRQAPGKERESVAAINWSAGY |
| | | TAYADSVKGRFTISADNSKNTAYLQMNSLKPEDTAVYYCATAPPNTGWHFDHWGQG |
| | | TLVTVSS |
| 4A-98 | 3187 | EVQLVESGGGLVQPGGSLRLSCAASGFTWGDYTMGWFRQAPGKEREFVAAINWSGG |
| | | NTYYADSVKGRFTISADNSKNTAYLQMNSLKPEDTAVYYCAADRRGLASTRAADYD |
| | | WGQGTLVTVSS |
| 4A-99 | 3188 | EVQLVESGGGLVQPGGSLRLSCAASGIPSTLRAMGWFRQAPGKEREFVAAVSSLGPFT |
| | | RYADSVKGRFTISADNSKNTAYLQMNSLKPEDTAVYYCAAKPGWVARDPSQYNWGQ |
| | | GTLVTVSS |
| 4A-100 | 3189 | EVQLVESGGGLVQPGGSLRLSCAASGFSFDDDYVMGWFRQAPGKEREFVAAINWSGG |
| | | STYYADSVKGRFTISADNSKNTAYLQMNSLKPEDTAVYYCAADRRGLASTRAADYDW |
| | | GQGTLVTVSS |
| 4A-101 | 3190 | EVQLVESGGGLVQPGGSLRLSCAASGRTFSNAAMGWFRQAPGKEREFVARILWTGAS |
| | | RSYADSVKGRFTISADNSKNTAYLQMNSLKPEDTAVYYCATTENPNPRWGQGTLVTV |
| | | SS |
| 4A-102 | 3191 | EVQLVESGGGLVQPGGSLRLSCAASGGTFGVYHMGWFRQAPGKEREGVAAINMSGD |
| | | DSAYADSVKGRFTISADNSKNTAYLQMNSLKPEDTAVYYCAILVGPGQVEFDHWGQG |
| | | TLVTVSS |
| 4A-103 | 3192 | EVQLVESGGGLVQPGGSLRLSCAASGFTFSSYYMGWFRQAPGKEREFVARI-- |
| | | SGSTFYADSVKGRFTISADNSKNTAYLQMNSLKPEDTAVYYCAALPFVCPSGSYSDYG |
| | | DEYDWGQGTLVTVSS |
| 4A-104 | 3193 | EVQLVESGGGLVQPGGSLRLSCAASGRTFSGDFMGWFRQAPGKEREFVGRINWSGGN |
| | | TYYADSVRGLFTITADNNKNTAYLMMNLLKPEDTAVYYCPTDPPLFWGLGTLVTWSS |
| 4A-105 | 3194 | EVQLVESGGGLVQPGGSLRLSCAASGSTLRDYAMGWFRQAPGKERESVAAITWSGGS |
| | | TAYADSVKGRFTISADNSKNTAYLQMNSLKPEDTAVYYCASLLAGDRYFDYWGQGTL |
| | | VTVSS |
| 4A-106 | 3195 | EVQLVESGGGLVQPGGSLRLSCAASGFTFDDYTMGWFRQAPGKEREFVAAITDNGGS |
| | | KYYADSVKGRFTISADNSKNTAYLQMNSLKPEDTAVYYCAADRRGLASTRAADYDW |
| | | GQGTLVTVSS |
| 4A-107 | 3196 | EVQLVESGGGLVQPGGSLRLSCAASGGTFSSYGMGWFRQAPGKEREFVAAINWSGAS |
| | | TYYADSVKGRFTISADNSKNTAYLQMNSLKPEDTAVYYCARDWRDRTWGNSLDYWG |
| | | QGTLVTVSS |
| 4A-108 | 3197 | EVQLVESGGGLVQPGGSLRLSCAASGFSFDDDYVMGWFRQAPGKEREFVAAISWSED |
| | | NTYYADSVKGRFTISADNSKNTAYLQMNSLKPEDTAVYYCAADRRGLASTRAADYD |
| | | WGQGTLVTVSS |
| 4A-109 | 3198 | EVQLVESGGGLVQPGGSLRLSCAASGFSFDDDYVMGWFRQAPGKEREFVAAVSGSGD |
| | | DTYYADSVKGRFTISADNSKNTAYLQMNSLKPEDTAVYYCAADRRGLASTRAADYD |
| | | WGQGTLVTVSS |
| 4A-110 | 3199 | EVQLVESGGGLVQPGGSLRLSCAASGNIAAINVMGWFRQAPGKEREFVAAISASGRRT |
| | | DYADSVKGRFTISADNSKNTAYLQMNSLKPEDTAVYYCARRVYYYDSSGPPGVTFDI |
| | | WGQGTLVTVSS |
| 4A-111 | 3200 | EVQLVESGGGLVQPGGSLRLSCAASGIITSRYVMGWFRQAPGKEREGVAAISTGGSTIY |
| | | ADSVKGRFTISADNSKNTAYLQMNSLKPEDTAVYYCARQDSSSPYFDYWGQGTLVTV |
| | | SS |
| 4A-112 | 3201 | EVQLVESGGGLVQPGGSLRLSCAASGFSFDDDYVMGWFRQAPGKEREFVAAISNSGLS |
| | | TYYADSVKGRFTISADNSKNTAYLQMNSLKPEDTAVYYCAADRRGLASTRAADYDW |
| | | GQGTLVTVSS |
| 4A-113 | 3202 | EVQLVESGGGLVQPGGSLRLSCAASGSISSINVMGWFRQAPGKEREFVATMRWSTGST |
| | | YYADSVKGRFTISADNSKNTAYLQMNSLKPEDTAVYYCAQRVRGFFGPLRTTPSWYE |
| | | WGQGTLVTVSS |
| 4A-114 | 3203 | EVQLVESGGGLVQPGGSLRLSCAASGLTFILYRMGWFRQAPGKEREFVAAINNFGTTK |
| | | YADSVKGRFTISADNSKNTAYLQMNSLKPEDTAVYYCARTHYDFWSGYTSRTPNYFD |
| | | YWGQGTLVTVSS |
| 4A-115 | 3204 | EVQLVESGGGLVQPGGSLRLSCAASGGTFSVYHMGWFRQAPGKEREPVAAISWSGGS |
| | | TAYADSVKGRFTISADNSKNTAYLQMNSLKPEDTAVYYCAAVNTWTSPSFDSWGQGT |
| | | LVTVSS |
| 4A-116 | 3205 | EVQLVESGGGLVQPGGSLRLSCAASGRAFSTYGMGWFRQAPGKEREFVAGINWSGDT |
| | | PYYADSVKGRFTISADNSKNTAYLQMNSLKPEDTAVYYCAREVGPPPGYFDLWGQGT |
| | | LVTVSS |
| 4A-117 | 3206 | EVQLVESGGGLVQPGGSLRLSCAASGRTFSDIAMGWFRQAPGKEREFVASINWGGGNT |
| | | YYADSVKGRFTISADNSKNTAYLQMNSLKPEDTAVYYCAAKGIWDYLGRRDFGDWG |
| | | QGTLVTVSS |
| 4A-118 | 3207 | EVQLVESGGGLVQPGGSLRLSCAASGRTFSSARMGWFRQAPGKEREFVAAISWSGDNT |
| | | HYADSVKGRFTISADNSKNTAYLQMNSLKPEDTAVYYCATTENPNPRWGQGTLVTVS |
| | | S |
| 4A-119 | 3208 | EVQLVESGGGLVQPGGSLRLSCAASGFAFSSYAMGWFRQAPGKEREWVATINGDDYT |
| | | YYADSVKGRFTISADNSKNTAYLQMNSLKPEDTAVYYCVATPGGYGLWGQGTLVTVS |
| | | S |
| 4A-120 | 3209 | EVQLVESGGGLVQPGGSLRLSCAASGITFRRHDMGWFRQAPGKEREFVAAIRWSSSST |
| | | VYADSVKGRFTISADNSKNTAYLQMNSLKPEDTAVYYCAADRGVYGGRWYRTSQYT |
| | | WGQGTLVTVSS |
| 4A-121 | 3210 | EVQLVESGGGLVQPGGSLRLSCAASGTAASFNPMGWFRQAPGKEREFVAAITSGGSTN |
| | | YADSVKGRFTISADNSKNTAYLQMNSLKPEDTAVYYCAAIAYEEGVYRWDWGQGTL |
| | | VTVSS |
| 4A-122 | 3211 | EVQLVESGGGLVQPGGSLRLSCAASGNINIINYMGWFRQAPGKEREGVAAIHWNGDST |
| | | AYADSVKGRFTISADNSKNTAYLQMNSLKPEDTAVYYCASGPPYSNYFAYWGQGTLV |
| | | TVSS |
| 4A-123 | 3212 | EVQLVESGGGLVQPGGSLRLSCAASGFTFDDYAMGWFRQAPGKERESVAAISGSGGST |
| | | AYADSVKGRFTISADNSKNTAYLQMNSLKPEDTAVYYCAKIMGSGRPYFDHWGQGTL |
| | | VTVSS |
| 4A-124 | 3213 | EVQLVESGGGLVQPGGSLRLSCAASGNIFTRNVMGWFRQAPGKEREFVAAITSSGSTN |
| | | YADSVKGRFTISADNSKNTAYLQMNSLKPEDTAVYYCARPSSDLQGGVDYWGQGTLV |
| | | TVSS |
| 4A-125 | 3214 | EVQLVESGGGLVQPGGSLRLSCAASGRTFSSIAMGWFRQAPGKEREFVASINWGGGNT |
| | | IYADSVKGRFTISADNSKNTAYLQMNSLKPEDTAVYYCAAKGIWDYLGRRDFGDWGQ |
| | | GTLVTVSS |
| 4A-126 | 3215 | EVQLVESGGGLVQPGGSLRLSCAASGIPSTLRAMGWFRQAPGKEREFVAAVSSLGPFT |
| | | RYADSVKGRFTISADNSKNTAYLQMNSLKPEDTAVYYCAAKPGWVARDPSEYNWGQ |
| | | GTLVTVSS |
| 4A-127 | 3216 | EVQLVESGGGLVQPGGSLRLSCAASGFTLDDSAMGWFRQAPGKEREWVAAITNGGST |
| | | YYADSVKGRFTISADNSKNTAYLQMNSLKPEDTAVYYCARFARGSPYFDFWGQGTLV |
| | | TVSS |
| 4A-128 | 3217 | EVQLVESGGGLVQPGGSLRLSCAASGSISSFNAMGWFRQAPGKERESVAAIDWDGSTA |
| | | YADSVKGRFTISADNSKNTAYLQMNSLKPEDTAVYYCARGGGYYGSGSFEYWGQGTL |
| | | VTVSS |
| 4A-129 | 3218 | EVQLVESGGGLVQPGGSLRLSCAASGNIFSDNIIGWFRQAPGKEREMVAYYTSGGSIDY |
| | | ADSVKGRFTISADNSKNTAYLQMNSLKPEDTAVYYCARGTAVGRPPPGGMDVWGQG |
| | | TLVTVSS |
| 4A-130 | 3219 | EVQLVESGGGLVQPGGSLRLSCAASGSISSIGAMGWFRQAPGKEREGVAAISSSGSSTV |
| | | YADSVKGRFTISADNSKNTAYLQMNSLKPEDTAVYYCARVPPGQAYFDSWGQGTLVT |
| | | VSS |
| 4A-131 | 3220 | EVQLVESGGGLVQPGGSLRLSCAASGFTFDDYGMGWFRQAPGKERELVATITWSGDS |
| | | TYYADSVKGRFTISADNSKNTAYLQMNSLKPEDTAVYYCAKGGSWYYDSSGYYGRW |
| | | GQGTLVTVSS |
| 4A-132 | 3221 | EVQLVESGGGLVQPGGSLRLSCAASGRTFSNYTMGWFRQAPGKEREWVSAISWSTGST |
| | | YYADSVKGRFTISADNSKNTAYLQMNSLKPEDTAVYYCAADRYGPPWYDWGQGTLV |
| | | TVSS |
| 4A-133 | 3222 | EVQLVESGGGLVQPGGSLRLSCAASGSTNYMGWFRQAPGKEREGVAAISMSGDDTIY |
| | | ADSVKGRFTISADNSKNTAYLQMNSLKPEDTAVYYCARIGLRGRYFDLWGQGTLVTV |
| | | SS |
| 4A-134 | 3223 | EVQLVESGGGLVQPGGSLRLSCAASGGTFSSVGMGWFRQAPGKERELVAVINWSGAR |
| | | TYYADSVKGRFTISADNSKNTAYLQMNSLKPEDTAVYYCAVPWMDYNRRDWGQGTL |
| | | VTVSS |
| 4A-135 | 3224 | EVQLVESGGGLVQPGGSLRLSCAASGRIFTNTAMGWFRQAPGKEREGVAAINWSGGST |
| | | AYADSVKGRFTISADNSKNTAYLQMNSLKPEDTAVYYCARTSGSYSFDYWGQGTLVT |
| | | VSS |
| 4A-136 | 3225 | EVQLVESGGGLVQPGGSLRLSCAASGEEFSDHWMGWFRQAPGKEREFVGAIHWSGGR |
| | | TYYADSVKGRFTISADNSKNTAYLQMNSLKPEDTAVYYCAADRRGLASTRAADYDW |
| | | GQGTLVTVSS |
| 4A-137 | 3226 | EVQLVESGGGLVQPGGSLRLSCAASGRTFSSIAMGWFRQAPGKEREFVAAINWSGART |
| | | AYADSVKGRFTISADNSKNTAYLQMNSLKPEDTAVYYCAAKGIWDYLGRRDFGDWG |
| | | QGTLVTVSS |
| 4A-138 | 3227 | EVQLVESGGGLVQPGGSLRLSCAASGSTSSLRTMGWFRQAPGKEREGVAAISSRDGSTI |
| | | YADSVKGRFTISADNSKNTAYLQMNSLKPEDTAVYYCARDDSSSPYFDYWGQGTLVT |
| | | VSS |
| 4A-139 | 3228 | EVQLVESGGGLVQPGGSLRLSCAASGGGTFGSYAMGWFRQAPGKEREFVAAISIASGA |
| | | SGGTTNYADSVKGRFTISADNSKNTAYLQMNSLKPEDTAVYYCATTMNPNPRWGQGT |
| | | LVTVSS |
| 4A-140 | 3229 | EVQLVESGGGLVQPGGSLRLSCAASGRTFSNAAMGWFRQAPGKEREFVARITWNGGS |
| | | TFYADSVKGRFTISADNSKNTAYLQMNSLKPEDTAVYYCATTENPNPRWGQGTLVTV |
| | | SS |
| 4A-141 | 3230 | EVQLVESGGGLVQPGGSLRLSCAASGIILSDNAMGWFRQAPGKEREFVAAISWLGEST |
| | | YYADSVKGRFTISADNSKNTAYLQMNSLKPEDTAVYYCAADRRGLASTRAADYDWG |
| | | QGTLVTVSS |
| 4A-142 | 3231 | EVQLVESGGGLVQPGGSLRLSCAASGRTFGDYIMGWFRQAPGKERESVAAINWNGGY |
| | | TAYADSVKGRFTISADNSKNTAYLQMNSLKPEDTAVYYCATTSPNTGWHYYRWGQG |
| | | TLVTVSS |
| 4A-143 | 3232 | EVQLVESGGGLVQPGGSLRLSCAASGFNFNWYPMGWFRQAPGKERESVAAISWTGVS |
| | | TYTAYADSVKGRFTISADNSKNTAYLQMNSLKPEDTAVYYCARWGPGPAGGSPGLVG |
| | | FDYWGQGTLVTVSS |
| 4A-144 | 3233 | EVQLVESGGGLVQPGGSLRLSCAASGSIRSVSVMGWFRQAPGKEREAVAAISWSGVGT |
| | | AYADSVKGRFTISADNSKNTAYLQMNSLKPEDTAVYYCAAYQRGWGDWGQGTLVTV |
| | | SS |
| 4A-145 | 3234 | EVQLVESGGGLVQPGGSLRLSCAASGMTFRLYAMGWFRQAPGKEREFVGAINWLSES |
| | | TYYADSVKGRFTISADNSKNTAYLQMNSLKPEDTAVYYCAAKPGWVARDPSEYNWG |
| | | QGTLVTVSS |
| 4A-146 | 3235 | EVQLVESGGGLVQPGGSLRLSCAASGRTFSDDAMGWFRQAPGKEREFVAAINWSGGS |
| | | TYYADSVKGRFTISADNSKNTAYLQMNSLKPEDTAVYYCATDPPLFWGQGTMVTVSS |
| 4A-147 | 3236 | EVQLVESGGGLVQPGGSLRLSCAASGGTFSVYAMGWFRQAPGKEREGVAAISMSGDD |
| | | AAYADSVKGRFTISADNSKNTAYLQMNSLKPEDTAVYYCAKISKDDGGKPRGAFFDS |
| | | WGQGTLVTVSS |
| 4A-148 | 3237 | EVQLVESGGGLVQPGGSLRLSCAASGFALGYYAMGWFRQAPGKERESVAAISSRDGST |
| | | AYADSVKGRFTISADNSKNTAYLQMNSLKPEDTAVYYCARLATGPQAYFHHWGQGTL |
| | | VTVSS |
| 4A-149 | 3238 | EVQLVESGGGLVQPGGSLRLSCAASGFNLDDYAMGWFRQAPGKERESVAAISWDGGA |
| | | TAYADSVKGRFTISADNSKNTAYLQMNSLKPEDTAVYYCARVGRGTTAFDSWGQGTL |
| | | VTVSS |
| 4A-150 | 3239 | EVQLVESGGGLVQPGGSLRLSCAASGNTFSGGFMGWFRQAPGKEREFVASIRSGARTY |
| | | YADSVKGRFTISADNSKNTAYLQMNSLKPEDTAVYYCAQRVRGFFGPLRTTPSWYEW |
| | | GQGTLVTVSS |
| 4A-151 | 3240 | EVQLVESGGGLVQPGGSLRLSCAASGSIRSINIMGWFRQAPGKEREAVAAISWSGGSTV |
| | | YADSVKGRFTISADNSKNTAYLQMNSLKPEDTAVYYCASLLAGDRYFDYWGQGTLVT |
| | | VSS |
| 5A-1 | 3241 | EVQLVESGGGLVQPGGSLRLSCAASGGTFSSIGMGWFRQAPGKEREFVAAISWDGGAT |
| | | AYADSVKGRFTISADNSKNTAYLQMNSLKPEDTAVYYCAKEDVGKPFDWGQGTLVT |
| | | VSS |
| 5A-2 | 3242 | EVQLVESGGGLVQPGGSLRLSCAASGLRFDDYAMGWFRQAPGKERELVAIKFSGGTT |
| | | DYADSVKGRFTISADNSKNTAYLQMNSLKPEDTAVYYCASWDGLIGLDAYEYDWGQ |
| | | GTLVTVSS |
| 5A-3 | 3243 | EVQLVESGGGLVQPGGSLRLSCAASGSIFSIDVMGWFRQAPGKEREFVAGISWSGDSTL |
| | | YADSVKGRFTISADNSKNTAYLQMNSLKPEDTAVYYCAAFDGYTGSDWGQGTLVTVS |
| | | S |
| 5A-4 | 3244 | EVQLVESGGGLVQPGGSLRLSCAASGFTLADYAMGWFRQAPGKEREFVAVITCSGGST |
| | | DYADSVKGRFTISADNSKNTAYLQMNSLKPEDTAVYYCAADDCYIGCGWGQGTLVTV |
| | | SS |
| 5A-5 | 3245 | EVQLVESGGGLVQPGGSLRLSCAASGRTFSSIAMGWFRQAPGKERELVAEITEGGISPS |
| | | GDNIYYADSVKGRFTISADNSKNTAYLQMNSLKPEDTAVYYCAAELHSSDYTSPGAES |
| | | DYGWGQGTLVTVSS |
| 5A-6 | 3246 | EVQLVESGGGLVQPGGSLRLSCAASGPTFSSYAMMGWFRQAPGKEREWVAAINNFGT |
| | | TKYADSVKGRFTISADNSKNTAYLQMNSLKPEDTAVYYCAASASDYGLGLELFHDEY |
| | | NWGQGTLVTVSS |
| 5A-7 | 3247 | EVQLVESGGGLVQPGGSLRLSCAASGSTGYMGWFRQAPGKEREFVAAIHSGGSTNYA |
| | | DSVKGRFTISADNSKNTAYLQMNSLKPEDTAVYYCATVATALIWGQGTLVTVSS |
| 5A-8 | 3248 | EVQLVESGGGLVQPGGSLRLSCAASGRPFSEYTMGWFRQAPGKEREFVSSIHWGGRGT |
| | | NYADSVKGRFTISADNSKNTAYLQMNSLKPEDTAVYYCAAELHSSDYTSPGAYAWGQ |
| | | GTLVTVSS |
| 5A-9 | 3249 | EVQLVESGGGLVQPGGSLRLSCAASGLTLSTYGMGWFRQAPGKEREFVAHIPRSTYSP |
| | | YYADSVKGRFTISADNSKNTAYLQMNSLKPEDTAVYYCAAIGDGAVWGQGTLVTVSS |
| 5A-10 | 3250 | EVQLVESGGGLVQPGGSLRLSCAASGFTFNNHNMGWFRQAPGKEREFVAAISSYSHTA |
| | | YADSVKGRFTISADNSKNTAYLQMNSLKPEDTAVYYCALQPFGASNYRWGQGTLVTV |
| | | SS |
| 5A-11 | 3251 | EVQLVESGGGLVQPGGSLRLSCAASGGIYRVMGWFRQAPGKERELVASTSSGGGINYA |
| | | DSVKGRFTISADNSKNTAYLQMNSLKPEDTAVYYCAAESWGRQWGQGTLVTVSS |
| 5A-12 | 3252 | EVQLVESGGGLVQPGGSLRLSCAASGYTDSNLWMGWFRQAPGKEREFVAINRSTGSTS |
| | | YADSVKGRFTISADNSKNTAYLQMNSLKPEDTAVYYCATSGSGSPNWGQGTLVTVSS |
| 5A-13 | 3253 | EVQLVESGGGLVQPGGSLRLSCAASGFTFDYYTMGWFRQAPGKEREFVAAIRSSGGLF |
| | | YADSVKGRFTISADNSKNTAYLQMNSLKPEDTAVYYCAAYLDGYSGSWGQGTLVTVS |
| | | S |
| 5A-14 | 3254 | EVQLVESGGGLVQPGGSLRLSCAASGGIFSINVMGWFRQAPGKEREWVSAIRWNGGN |
| | | TAYADSVKGRFTITADNSKNTAYLQMNSLKPEDTAVYYCAGFDGYTGSDWGQGTLVT |
| | | VSS |
| 5A-15 | 3255 | EVQLVESGGGLVQPGGSLRLSCAASGFTFDGAAMGWFRQAPGKEREFVATIRWTNST |
| | | DYADSVKGRFTISADNSKNTAYLQMNSLKPEDTAVYYCARGRYGIVERWGQGTLVTV |
| | | SS |
| 5A-16 | 3256 | EVQLVESGGGLVQPGGSLRLSCAASGRTHSIYPMGWFRQAPGKERELVAAIHSGGATV |
| | | YADSVKGRFTISADNSKNTAYLQMNSLKPEDTAVYYCAARRWIPPGPIWGQGTLVTVS |
| | | S |
| 5A-17 | 3257 | EVQLVESGGGLVQPGGSLRLSCAASGPTFSIYAMGWFRQAPGKEREFVAGIRWSDVYT |
| | | QYADSVKGRFTISADNSKNTAYLQMNSLKPEDTAVYYCALDIDYRDWGQGTLVTVSS |
| 5A-18 | 3258 | EVQLVESGGGLVQPGGSLRLSCAASGLTFDDNIHVMGWFPQAPGKEREFVAAIHWSG |
| | | GSTIYADSVKGRFTINADNSKNTAYLQMNSLKPEDTAVYYCAADVYPQDYGLGYVEG |
| | | KMYYGMDWGQGTLVTVSS |
| 5A-19 | 3259 | EVQLVESGGGLVQPGGSLRLSCAASGLTLDYYAMGWFRQAPGKEREWVASINWSGGS |
| | | TYYADSVKGRFTISADNSKNTAYLQMNSLKPEDTAVYYCAAYGSGEFDWGQGTLVTV |
| | | SS |
| 5A-20 | 3260 | EVQLVESGGGLVQPGGSLRLSCAASGRTIVPYTMGWFRQAPGKERELVAAISPSAFTEY |
| | | ADSVKGRFTISADNSKNTAYLQMNSLKPEDTAVYYCAARRWGYDWGQGTLVTVSS |
| 5A-21 | 3261 | EVQLVESGGGLVQPGGSLRLSCAASGGTFTTYHMGWFRQAPGKEREFVAHISTGGATN |
| | | YADSVKGRFTISADNSKNTAYLQMNSLKPEDTAVYYCATFPAIVTDSDYDLGNDWGQ |
| | | GTLVTVSS |
| 5A-22 | 3262 | EVQLVESGGGLVQPGGSLRLSCAASGFTFNVFAMGWFRQAPGKEREFVAAINWSDSRT |
| | | DYADSVKGRFTISADNSKNTAYLQMNSLKPEDTAVYYCASGSDNRARELSRYEYVWG |
| | | QGTLVTVSS |
| 5A-23 | 3263 | EVQLVESGGGLVQPGGSLRLSCAASGSIFSIDVMGWFRQAPGKEREFVAAISWSGESTL |
| | | YADSVKGRFTISADNSKNTAYLQMNSLKPEDTAVYYCAAFDGYSGSDWGQGTLVTVS |
| | | S |
| 5A-24 | 3264 | EVQLVESGGGLVQPGGSLRLSCAASGFTFSSYSMGWFRQAPGKEREFVAAISSYSHTA |
| | | YADSVKGRFTIIADNSKNTAYLQMNSLKPEDTAVYYCALQPFGASSYRWGQGTLVTVS |
| | | S |
| 5A-25 | 3265 | EVQLVESGGGLVQPGGSLRLSCAASGNTFSINVMGWFRQAPGKEREFVAAIHWSGDST |
| | | LYADSGKGRFTIIADNNKNTAYLQMISLKPEDTAVYYCAAFDGYSGNHWGQGTLVTV |
| | | SS |
| 5A-26 | 3266 | EVQLVESGGGLVQPGGSLRLSCAASGRTISSYIMGWFRQAPGKERELVARIYTGGDTIY |
| | | ADSVKGRFTISADNSKNTAYLQMNSLKPEDTAVYYCAARTSYNGRYDYIDDYSWGQG |
| | | TLVTVSS |
| 5A-27 | 3267 | EVQLVESGGGLVQPGGSLRLSCAASGRANSINWMGWFRQAPGKEREFVATITPGGNTN |
| | | YADSVKGRFTISADNSKNTAYLQMNSLKPEDTAVYYCAAAAGSTWYGTLYEYDWGQ |
| | | GTLVTVSS |
| 5A-28 | 3268 | EVQLVESGGGLVQPGGSLRLSCAASGGTFSVFAMGWFRQVPGKERELVAEITAGGSTY |
| | | YADSVKGRFTISADNSKNTAYLQMNSLKPEDTAVYYCAVDGPFGWGQGTLVTVSS |
| 5A-29 | 3269 | EVQLVESGGGLVQPGGSLRLSCAASGFTFDDYPMGWFRQAPGKEREGVASVLRGGYT |
| | | WYADSVKGRFTISADNSKNTAYLQMNSLKPEDTAVYYCAKDWATGLAWGQGTLVTV |
| | | SS |
| 5A-30 | 3270 | EVQLVESGGGLVQPGGSLRLSCAASGFALGYYAMGWFRQAPGKEREFVAGIRWTDAY |
| | | TEYADSVKGRFTISADNSKNTAYLQMNSLKPEDTAVYYCAADVSPSYGSRWYWGQGT |
| | | LVTVSS |
| 5A-31 | 3271 | EVQLVESGGGLVQPGGSLRLSCAASGRTLDIHVMGWFRQAPGKEREFVAVINWTGEST |
| | | LYADSVKGRFTISADNSKNTAYLQMNSLKPEDTAVYYCAAFDGYTGNYWGQGTLVT |
| | | VSS |
| 5A-32 | 3272 | EVQLVESGGGLVQPGGSLRLSCAASGFTPDNYAMGWFRQAPGKEREFVAALGWSGVT |
| | | TYHYYADSVKGRFTISADNSKNTAYLQMNSLKPEDTAVYYCASDESDAANWGQGTL |
| | | VTVSS |
| 5A-33 | 3273 | EVQLVESGGGLVQPGGSLRLSCAASGFTFDDYAMGWFRQAPGKERELVATIMWSGNT |
| | | TYYADSVRRRFIIRDNNNKNTAHLQMNSLKPEDTAVYYCATNDDDVWGQGTLVTVSS |
| 5A-34 | 3274 | EVQLVESGGGLVQPGGSLRLSCAASGRTFSRYIMGWFRQAPGKEREFVAAISWSGGDN |
| | | TYYADSVKGRFTISADNSKNTAYLQMNSLKPEDTAVYYCAAYRIVVGGTSPGDWRWG |
| | | QGTLVTVSS |
| 5A-35 | 3275 | EVQLVESGGGLVQPGGSLRLSCAASGPTFSIYAMGWFRQAPGKERELVAGISWNGGST |
| | | NYADSVKGRFTISADNSKNTAYLQMNSLKPEDTAVYYCALRRRFGGQEWGQGTLVTV |
| | | SS |
| 5A-36 | 3276 | EVQLVESGGGLVQPGGSLRLSCAASGRTFSLNAMGWFRQAPGKERELVAAISCGGGST |
| | | YADNGKGRFTIITDNSKNTAYLQMMNLKPEDTAAYYCAADNDMGYCSWGQGTLVTV |
| | | SS |
| 5A-37 | 3277 | EVQLVESGGGLVQPGGSLRLSCAASGSTFSINAMGWFRQAPGKEREFVGGISRSGATTN |
| | | YADSVKGRFTISADNSKNTAYLQMNSLKPEDTAVYYCAADGVPEYSDYASGPVWGQ |
| | | GTLVTVSS |
| 5A-38 | 3278 | EVQLVESGGGLVQPGGSLRLSCAASGRTFSMHAMGWFRQAPGKERELVASISSQGRTN |
| | | YADSVKGRFTISADNSKNTAYLQMNSLKPEDTAVYYCAAEVRNGSDYLPIDWGQGTL |
| | | VTVSS |
| 5A-39 | 3279 | EVQLVESGGGLVQPGGSLRLSCAASGVTLDLYAMGWFRQAPGKEREFVAGIRWTDAY |
| | | TEYADSVKGRFTISADNSKNTAYLQMNSLKPEDTAVYYCAVDIDYRDWGQGTLVTVS |
| | | S |
| 5A-40 | 3280 | EVQLVESGGGLVQPGGSLRLSCAASGLPFTINVMGWFRQAPGKEREFVAAIHWSGLTT |
| | | FYADSVKGLFTITEDNSKNTAHLMMNLLKPEDTAVYCCAELDGYFFAHWGQGTLVTV |
| | | SS |
| 5A-41 | 3281 | EVQLVESGGGLVQPGGSLRLSCAASGRAFSNYAMGWFRQAPGKEREFVAWINNRGTT |
| | | DYADSGSTYYADSVKGRFTISADNSKNTAYLQMNSLKPEDTAVYYCASTDDYGVDW |
| | | GQGTLVTVSS |
| 5A-42 | 3282 | EVQLVESGGGLVQPGGSLRLSCAASGFTPDDYAMGWFRQAPGKEREFVASIGYSGRSN |
| | | SYNYYADSVKGRFTISADNSKNTAYLQMNSLKPEDTAVYYCAIAHGSSTYNWGQGTL |
| | | VTVSS |
| 5A-43 | 3283 | EVQLVESGGGLVQPGGSLRLSCAASGFTLNYYGMGWFPQAPGKEREFVAAITSGGAPH |
| | | YADSVKGRFTINADNSKNTAYLQMNSLKPEDTAVYYCASAYDRGIGYDWGQGTLVT |
| | | VSS |
| 5A-44 | 3284 | EVQLVESGGGLVQPGGSLRLSCAASGLPFSTKSMGWFRQAPGKEREFVAAIHWSGLTS |
| | | YADSVKGRFTISADNSKNTAYLQMNSLKPEDTAVYYCAADRAADFFAQRDEYDWGQ |
| | | GTLVTVSS |
| 5A-45 | 3285 | EVQLVESGGGLVQPGGSLRLSCAASGRTFSINAMGWFPQAPGKERELVAAISWSGEST |
| | | QYADSVKGRFTISADNSKNTAYLQMNSLKPEDTAVYYCAAFDGGSGTQWGQGTLVT |
| | | VSS |
| 5A-46 | 3286 | EVQLVESGGGLVQPGGSLRLSCAASGEEFSDHWMGWFRQAPGKEREFVAAIHWSGDS |
| | | THRNYADSVKGRFTISADNSKNTAYLQMNSLKPEDTAVYYCATVGITLNWGQGTLVT |
| | | VSS |
| 5A-47 | 3287 | EVQLVESGGGLVQPGGSLRLSCAASGFTFGSYDMGWFRQAPGKEREFVTAINWSGAR |
| | | TAYADSVKGRFTISADNSKNTAYLQMNSLKPEDTAVYYCAARSVYSYEYNWGQGTLV |
| | | TVSS |
| 5A-48 | 3288 | EVQLVESGGGLVQPGGSLRLSCAASGLPLDLYAMGWFPPAPGKELEFVAGIRWSDAYT |
| | | EYADSVKGRFTINADNSKNPANLQMNSLKPEDTAVYYCALDIDYRHWGQGTLVTVSS |
| 5A-49 | 3289 | EVQLVESGGGLVQPGGSLRLSCAASGRTSTVNGMGWFRQAPGKEREFVASISQSGAAT |
| | | AYADSVKGRFTISADNSKNTAYLQMNSLKPEDTAVYYCAADRTYSYSSTGYYWGQGT |
| | | LVTVSS |
| 5A-50 | 3290 | EVQLVESGGGLVQPGGSLRLSCAASGFSLDYYGMGWFRQAPGKEREFVAAITSGGTPH |
| | | YADSVKGRFTISADNSKNTAYLQMNSLKPEDTAVYYCASAYNPGIGYDWGQGTLVTV |
| | | SS |
| 5A-51 | 3291 | EVQLVESGGGLVQPGGSLRLSCAASGRPNSINWMGWFRQAPGKERQFVATITPGGNTN |
| | | YADSVKGRFTISADNSKNTAYLLMNSLKPEDTAVYYCAAAAGTTWYGTLYEYDWGQ |
| | | GTLVTVSS |
| 5A-52 | 3292 | EVQLVESGGGLVQPGGSLRLSCAASGEKFSDHWMGWFRQAPGKEREFVATITFSGART |
| | | AYADSVKGRFTISADNSKNTAYLQMNSLKPEDTAVYYCAALIKPSSTDRIFEEWGQGT |
| | | LVTVSS |
| 5A-53 | 3293 | EVQLVESGGGLVQPGGSLRLSCAASGLTVVPYAMGWFRQAPGKEREFVAAIRRSAVT |
| | | NYADSVKGRFTIIADNSKNTAYLLMNSLKPEDTAVYYCAARRWGYHYWGQGTLVTV |
| | | SS |
| 5A-54 | 3294 | EVQLVESGGGLVQPGGSLRLSCAASGTTFNFNVMGWFRQAPGKERELVAVISWTGEST |
| | | LYADSVKGRFTISADNSKNTAYLQMNSLKPEDTAVYYCAAFDGYTGRDWGQGTLVT |
| | | VSS |
| 5A-55 | 3295 | EVQLVESGGGLVQPGGSLRLSCAASGIDVNRNAMGWFRQAPGKEREFVAAITWSGGW |
| | | RYYADSVKGRFTISADNSKNTAYLQMNSLKPEDTAVYYCATTFGDAGIPDQYDFGWG |
| | | QGTLVTVSS |
| 5A-56 | 3296 | EVQLVESGGGLVQPGGSLRLSCAASGRTFSSNMGWFRQAPGKEREFVARIFGGDRTLY |
| | | ADSVKGRFTISADNSKNTAYLQMNSLKPEDTAVYYCADINGDWGQGTLVTVSS |
| 5A-57 | 3297 | EVQLVESGGGLVQPGGSLRLSCAASGGTFSMGWIRWVPQAQGKELEFMGCIGWITYY |
| | | ADYAKSRFSLFTDNADNIKNPPNMEMNPQKPEDTAVYYCAPFGWGQGTLVTVSS |
| 5A-58 | 3298 | EVQLVESGGGLVQPGGSLRLSCAASGCTLDYYAMGWFRQAPGKEREFVAGIRWTDAY |
| | | TEYADSVKGRFTISADNSKNTAYLQMNSLKPEDTAVYYCAADVSPSYGGRWYWGQG |
| | | TLVTVSS |
| 5A-59 | 3299 | EVQLVESGGGLVQPGGSLRLSCAASGLTFSLYRMCWFRQAPGKEREEVSCISNIDGSTY |
| | | YADSVKGRFTISADNSKNTAYLQMNSLKPEDTAVYYCAADLLGDSDYEPSSGFGWGQ |
| | | GTLVTVSS |
| 5A-60 | 3300 | EVQLVESGGGLVQPGGSLRLSCAASGRSFSSHRMGWFRQAPGKEREFVAAIMWSGSH |
| | | RNYADSVKGRFTISADNSKNTAYLQMNSLKPEDTAVYYCAAIAYEEGVYRWDWGQG |
| | | TLVTVSS |
| 5A-61 | 3301 | EVQLVESGGGLVQPGGSLRLSCAASGRIIVPNTMGWFRQAPGKERERVTGISPSAFTEY |
| | | ADSVKGRFTISADNSKNTAYLQMNSLKPEDTAVYYCAAHGWGCHWGQGTLVTVSS |
| 5A-62 | 3302 | EVQLVESGGGLVQPGGSLRLSCAASGSIFIISMGWFRQAPGKEHEFVTGINWSGGSTTY |
| | | ADSVKGRFTINADNSKNTAYLQMNSLKPEDTAVYYCAASAIGSGALRRFEYDWGQGT |
| | | LVTVSS |
| 5A-63 | 3303 | EVQLVESGGGLVQPGGSLRLSCAASGFSLDYYDMGWFRQAPGKEREFVAALGWSGGS |
| | | TDYADSVKGRFTISADNSKNTAYLQMNSLKPEDTAVYYCAAGNGGRYGIVERWGQGT |
| | | LVTVSS |
| 5A-64 | 3304 | EVQLVESGGGLVQPGGSLRLSCAASGTSISNRVMGWFRQAPGKERELVARIYTGGDTL |
| | | YADSVKGRFTISADNSKNTAYLQMNSLKPEDTAVYYCAARKIYRSLSYYGDYDWGQG |
| | | TLVTVSS |
| 5A-65 | 3305 | EVQLVESGGGLVQPGGSLRLSCAASGNIDRLYAMGWFRQAPGKEREGVAAIDSDGST |
| | | DYADSVKGRFTISADNSKNTAYLQMNSLKPEDTAVYYCAALIDYGLGFPIEWGQGTLV |
| | | TVSS |
| 5A-66 | 3306 | EVQLVESGGGLVQPGGSLRLSCAASGNTFTINVMGWFRQAPGKEREFVAAINWNGGT |
| | | TLYADSVKGRFTISADNSKNTAYLQMNSLKPEDTAVYYCAAFDGYSGIDWGQGTLVT |
| | | VSS |
| 5A-67 | 3307 | EVQLVESGGGLVQPGGSLRLSCAASGFNVNDYAMGWFRQAPGKEREFVAGITSSVGV |
| | | TNYADSVKGRFTISADNSKNTAYLQMNSLKPEDTAVYYCAADIFFVNWGRGTLVTVSS |
| 5A-68 | 3308 | EVQLVESGGGLVQPGGSLRLSCAASGFTFDHYTMGWFRQAPGKEREFVAAISGSENVT |
| | | SYADSVKGRFTISADNSKNTAYLQMNSLKPEDTAVYYCAAEPYIPVRTMRHMTFLTW |
| | | GQGTLVTVSS |
| 6A-1 | 3309 | EVQLVESGGGLVQPGGSLRLSCAASGRTFGNYNMGWFRQAPGKEREFVATINSLGGTS |
| | | YADSVKGRFTISADNSKNTAYLQMNSLKPEDTAVYYCARVDYYMDVWGQGTLVTVS |
| | | S |
| 6A-2 | 3310 | EVQLVESGGGLVQPGGSLRLSCAASGFTMSSSWMGWFRQAPGKEREFVTVISGVGTSY |
| | | ADSVKGRFTISADNSKNTAYLQMNSLKPEDTAVYYCARGPDSSGYGFDYWGQGTLVT |
| | | VSS |
| 6A-3 | 3311 | EVQLVESGGGLVQPGGSLRLSCAASGFTFSPSWMGWFRQAPGKEREFVATINEYGGRN |
| | | YADSVKGRFTISADNSKNTAYLQMNSLKPEDTAVYYCARVDRDFDYWGQGTLVTVSS |
| 6A-4 | 3312 | EVQLVESGGGLVQPGGSLRLSCAASGFTRDYYTMGWFRQAPGKEREFVAAISRSGSLT |
| | | SYADSVKGRFTISADNSKNTAYLQMNSLKPEDTAVYYCANLAYYDSSGYYDYWGQG |
| | | TLVTVSS |
| 6A-5 | 3313 | EVQLVESGGGLVQPGGSLRLSCAASGRTFTMGWFRQAPGKEREFVASTNSAGSTNYA |
| | | DSVNGRFTISADNSKNTAYLQMNSLKPEDTAVYYCTTVDQYFDYWGQGTLVTVSS |
| 6A-6 | 3314 | EVQLVESGGGLVQPGGSLRLSCAASGTTLDYYAMGWFRQAPGKERELVAAISWSGGS |
| | | TAYADSVKGRFTISADNSKNTAYLQMNSLKPEDTAVYYCAREDYYDSSGYSWGQGTL |
| | | VTVSS |
| 6A-7 | 3315 | EVQLVESGGGLVQPGGSLRLSCAASGFTFSSYWMGWFRQAPGKEREFVATINWSGVT |
| | | AYADSVKGRFTISADNSKNTAYLQMNSLKPEDTAVYYCARADDYFDYWGQGTLVTV |
| | | SS |
| 6A-8 | 3316 | EVQLVESGGGLVQPGGSLRLSCAASGFTLSGIWMGWFLQAPGKEHEFVAIITTGGRTTY |
| | | ADSXKGRFTSSSDNSKNTAYLQMNLLKPEDTAEYYCAGYSTFGSSSAYYYYSMDVGW |
| | | GQGTLVTVSS |
| 6A-9 | 3317 | EVQLVESGGGLVQPGGSLRLSCAASGFTFDYYAMGWFRQAPGKEREFVSAIDSEGRTS |
| | | YADSVKGRFTISADNSKNTAYLQMNSLKPEDTAVYYCARWGPFDIWGQGTLVTVSS |
| 6A-10 | 3318 | EVQLVESGGGLVQPGGSLRLSCAASGSIASIHAMGWFRQAPGKEREFVAAISRSGGFGS |
| | | YADSVKGRFTISADNSKNTAYLQMNSLKPEDTAVYYCARDDKYYDSSGYPAYFQHW |
| | | GQGTLVTVSS |
| 6A-11 | 3319 | EVQLVESGGGLVQPGGSLRLSCAASGLAFNAYAMGWFRQAPGKEREEVATIGWSGAN |
| | | TYYADSVKGRFTISADNSKNTAYLQMNSLKPEDTAVYYCASDPPGWGQGTLVTVSS |
| 6A-12 | 3320 | EVQLVESGGGLVQPGGSLRLSCAASGSTYTTYSMGWFRQAPGKEREFVAAISGSENVT |
| | | SYADSVKGRFTISADNSKNTAYLQMNSLKPEDTAVYYCARVDDYMDVWGQGTLVTV |
| | | SS |
| 6A-13 | 3321 | EVQLVESGGGLVQPGGSLRLSCAASGLTFNDYAMGWFRQAPGKEREFVAHIPRSTYSP |
| | | YYADSVKGRFTISADNSKNTAYLQMNSLKPEDTAVYYCAFLVGPQGVDHGAFDVWG |
| | | QGTLVTVSS |
| 6A-14 | 3322 | EVQLVESGGGLVQPGGSLRLSCAASGITFRFKAMGWFRQAPGKEREFVAAVSWDGRN |
| | | TYYADSVKGRFTISADNSKNTAYLQMNSLKPEDTAVYYCASDYYYMDVWGQGTLVT |
| | | VSS |
| 6A-15 | 3323 | EVQLVESGGGLVQPGGSLRLSCAASGSTVLINAMGWFRQAPGKEREFVAAVRWSDDY |
| | | TYYADSVKGRFTISADNSKNTAYLQMNSLKPEDTAVYYCAKEGRAGSLDYWGQGTL |
| | | VTVSS |
| 6A-16 | 3324 | EVQLVESGGGLVQPGGSLRLSCAASGFTFDDAAMGWFRQAPGKEREFVAHISWSGGS |
| | | TYYADSVKGRFTISADNSKNTAYLQMNSLKPEDTAVYYCATFGATVTATNDAFDIWG |
| | | QGTLVTVSS |
| 6A-17 | 3325 | EVQLVESGGGLVQPGGSLRLSCAASGNTGSTGYMGWFRQAPGKEREMVAGVINDGST |
| | | VYADSVKGRFTISADNSKNTAYLQMNSLKPEDTAVYYCARLATSHQDGTGYLFDYWG |
| | | QGTLVTVSS |
| 6A-18 | 3326 | EVQLVESGGGLVQPGGSLRLSCAASGLTFRNYAMGWFRQAPGKEREFIAGMMWSGGT |
| | | TTYADSVKGRFTISADNSKNTAYLQMNSLKPEDTAVYYCAREGYYYDSSGYLNYFDY |
| | | WGQGTLVTVSS |
| 6A-19 | 3327 | EVQLVESGGGLVQPGGSLRLSCAASGSILSIAVMGWFRQAPGKEREFVAAISPSAVTTY |
| | | YADSVKGRFTISADNSKNTAYLQMNSLKPEDTAVYYCAIGYYDSSGYFDYWGQGTLV |
| | | TVSS |
| 6A-20 | 3328 | EVQLVESGGGLVQPGGSLRLSCAASGSTLPYHAMGWFRQAPGKEREFVAAITWNGAS |
| | | TSYADSVKGRFTISADNSKNTAYLQMNSLKPEDTAVYYCARDRYYDTSASYFESETW |
| | | GQGTLVTVSS |
| 6A-21 | 3329 | EVQLVESGGGLVQPGGSLRLSCAASGTLFKINAMGWFRQAPGKEREFVAAITSSGSNID |
| | | YTYYADSVKGRFTISADNSKNTAYLQMNSLKPEDTAVYYCARSNTGWYSFDYWGQG |
| | | TLVTVSS |
| 6A-22 | 3330 | EVQLVESGGGLVQPGGSLRLSCAASGRTFSEVVMGWFRQAPGKEREFVATIHSSGSTS |
| | | YADSVKGRFTISADNSKNTAYLQMNSLKPEDTAVYYCVRVTSDYSMDSWGQGTLVTV |
| | | SS |
| 6A-23 | 3331 | EVQLVESGGGLVQPGGSLRLSCAASGSIFSMNTMGWFRQAPGKEREFVALINRSGGGI |
| | | NYADSVKGRFTISADNSKNTAYLQMNSLKPEDTAVYYCVRLSSGYYDFDYWGQGTLV |
| | | TVSS |
| 6A-24 | 3332 | EVQLVESGGGLVQPGGSLRLSCAASGFTLDYYAMGWFRQAPGKEREFVAAINWSGDN |
| | | THYADSVKGRFTISADNSKNTAYLQMNSLKPEDTAVYYCARAPFYCTTTKCQDNYYY |
| | | MDVWGQGTLVTVSS |
| 6A-25 | 3333 | EVQLVESGGGLVQPGGSLRLSCAASGLTFGTYTMGWFRQAPGKEREFVAAISRFGSTY |
| | | YADSVKGRFTISADNSKNTAYLQMNSLKPEDTAVYYCARGGDYDFWSVDYMDVWG |
| | | QGTLVTVSS |
| 6A-26 | 3334 | EVQLVESGGGLVQPGGSLRLSCAASGDTFSTSWMGWFRQAPGKEREFVATINTGGGT |
| | | NYADSVKGRFTISADNSKNTAYLQMNSLKPEDTAVYYCARVTTSFDYWGQGTLVTVS |
| | | S |
| 6A-27 | 3335 | EVQLVESGGGLVQPGGSLRLSCAASGITFRFKAMGWFRQAPGKEREFVASISRSGTTYY |
| | | ADSVKGRFTISADNSKNTAYLQMNSLKPEDTAVYYCATDYSAFDMWGQGTLVTVSS |
| 6A-28 | 3336 | EVQLVESGGGLVQPGGSLRLSCAASGDTYGSYWMGWFRQAPGKEREFVATITSDDRT |
| | | NYADSVKGRFTISADNSKNTAYLQMNSLKPEDTAVYYCARVTSSLSGMDVWGQGTLV |
| | | TVSS |
| 6A-29 | 3337 | EVQLVESGGGLVQPGGSLRLSCAASGYTLKNYYAMGWFRQAPGKERXLVAAIIWTGE |
| | | STLDADSVKGRFTISADNSKNTAYLQMNSLKPEDTAVYYCAREGYYDSSGYYWGQGT |
| | | LVTVSS |
| 6A-30 | 3338 | EVQLVESGGGLVQPGGSLRLSCAASGFAFGDSWMGWFRQAPGKEREFVATINWSGVT |
| | | AYADSVKGRFTISADNSKNTAYLQMNSLKPEDTAVYYCARADGYFDYWGQGTLVTV |
| | | SS |
| 6A-31 | 3339 | EVQLVESGGGLVQPGGSLRLSCAASGDTFSANRMGWFRQAPGKEREFVASITWSSANT |
| | | YYADSVKGRFTISADNSKNTAYLQMNSLKPEDTAVYYCATFNWNDEGFDFWGQGTL |
| | | VTVSS |
| 6A-32 | 3340 | EVQLVESGGGLVQPGGSLRLSCAASGFTLDYYDMGWFRQAPGKEREFVALISWSGGST |
| | | YYADSVKGRFTISADNSKNTAYLQMNSLKPEDTAVYYCATDFYGWGTRERDAFDIWG |
| | | QGTLVTVSS |
| 6A-33 | 3341 | EVQLVESGGGLVQPGGSLRLSCAASGTFQRINHMGWFRQAPGKEREFVATINTGGQPN |
| | | YADSVKGRFTISADNSKNTAYLQMNSLKPEDTAVYYCASLIAAQDYYFDYWGQGTLV |
| | | TVSS |
| 6A-34 | 3342 | EVQLVESGGGLVQPGGSLRLSCAASGSAFRSNAMGWFRQAPGKEREFVAHISWSSKST |
| | | YYADSVKGRFTISADNSKNTAYLQMNSLKPEDTAVYYCATYCSSTSCFDYWGQGTLV |
| | | TVSS |
| 6A-35 | 3343 | EVQLVESGGGLVQPGGSLRLSCAASGFTLAYYAMGWFRQAPGKEREFVAAISMSGDD |
| | | TIYADSVKGRFTISADNSKNTAYLQMNSLKPEDTAVYYCARELGYSSTVWPWGQGTL |
| | | VTVSS |
| 6A-36 | 3344 | EVQLVESGGGLVQPGGSLRLSCAASGFDFSVSWMGWFRQAPGKEREFVTAITWSGDST |
| | | NYADSVKGRFTISADNSKNTAYLQMNSLKPEDTAVYYCASLLHTGPSGGNYFDYWGQ |
| | | GTLVTVSS |
| 6A-37 | 3345 | EVQLVESGGGLVQPGGSLRLSCAASGHTFSTSWMGWFRQAPGKEREFVATINSLGGTN |
| | | YADSVKGRFTISADNSKNTAYLQMNSLKPEDTAVYYCARVSSGDYGMDVWGQGTLV |
| | | TVSS |
| 6A-38 | 3346 | EVQLVESGGGLVQPGGSLRLSCAASGNTFSGGFMGWFRQAPGKEREFVAVISSLSSKS |
| | | YADSVKGRFTISADNSKNTAYLQMNSLKPEDTAVYYCAKVDSGYDYWGQGTLVTVSS |
| 6A-39 | 3347 | EVQLVESGGGLVQPGGSLRLSCAASGFTFSPSWMGWFRQAPGKEREFVAAISWSGGST |
| | | AYADSVKGRFTISADNSKNTAYLQMNSLKPEDTAVYYCHGLGEGDPYGDYEGYFDL |
| | | WGQGTLVTVSS |
| 6A-40 | 3348 | EVQLVESGGGLVQPGGSLRLSCAASGFTFSDYWMGWFRQAPGKERELVARVWWNGG |
| | | SAYYADSVKGRFTISADNSKNTAYLQMNSLKPEDTAVYYCAREVLRQQVVLDYWGQ |
| | | GTLVTVSS |
| 6A-41 | 3349 | EVQLVESGGGLVQPGGSLRLSCAASGFTFSTSWMGWFRQAPGKEREFVASINEYGGRN |
| | | YADSVKGRFTISADNSKNTAYLQMNSLKPEDTAVYYCAGLHYYYDSSGYNPTEYYGM |
| | | DVWGQGTLVTVSS |
| 6A-42 | 3350 | EVQLVESGGGLVQPGGSLRLSCAASGDTYGSYWMGWFRQAPGKEREFVAVITSGGST |
| | | NYADSVKGRFTISADNSKNTAYLQMNSLKPEDTAVYYCTHVQNSYYYAMDVWGQGT |
| | | LVTVSS |
| 6A-43 | 3351 | EVQLVESGGGLVQPGGSLRLSCAASGRTFSSYAMMGWFRQAPGKEREFVASVNWDAS |
| | | QINYADSVKGRFTISADNSKNTAYLQMNSLKPEDTAVYYCTTLGAVYFDSSGYHDYFD |
| | | YWGQGTLVTVSS |
| 6A-44 | 3352 | EVQLVESGGGLVQPGGSLRLSCAASGGTFGVYHMGWFRQAPGKEREFIGRITWTDGST |
| | | YYADSVKGRFTISADNSKNTAYLQMNSLKPEDTAVYYCFGLLEVYDMTFDYWGQGTL |
| | | VTVSS |
| 6A-45 | 3353 | EVQLVESGGGLVQPGGSLRLSCAASGNMFSINAMGWFRQAPGKEREFVTLISWSSGRT |
| | | SYADSVKGRFTISADNSKNTAYLQMNSLKPEDTAVYYCASLGYCSGGSCFDYWGQGT |
| | | LVTVSS |
| 6A-46 | 3354 | EVQLVESGGGLVQPGGSLRLSCAASGLTFSAMGWFRQAPGKEREFVALIRRDGSTIYA |
| | | DSVKGRFTISADNSKNTAYLQMNSLKPEDTAVYYCAALGILFGYDAFDIWGQGTLVTV |
| | | SS |
| 6A-47 | 3355 | EVQLVESGGGLVQPGGSLRLSCAASGRTFSMHAMGWFRQAPGKERELVASITYGGNIN |
| | | YADSVKGRFTISADNSKNTAYLQMNSLKPEDTAVYYCAKEGYYDSTGYRTYFQQWG |
| | | QGTLVTVSS |
| 6A-48 | 3356 | EVQLVESGGGLVQPGGSLRLSCAASGFTVSNYAMGWFRQAPGKEREFVASVNWSGGT |
| | | TSYADSVKGRFTISADNSKNTAYLQMNSLKPEDTAVYYCATTGTVTLGYWGQGTLVT |
| | | VSS |
| 6A-49 | 3357 | EVQLVESGGGLVQPGGSLRLSCAASGSTVLINAMGWFRQAPGKEREFVAAISWSPGRT |
| | | DYADSVKGRFTISADNSKNTAYLQMNSLKPEDTAVYYCARDCSGGSCYSGDYWGQG |
| | | TLVTVSS |
| 6A-50 | 3358 | EVQLVESGGGLVQPGGSLRLSCAASGFSFDRWAMGWFRQAPGKEREWVASLATGGN |
| | | TNYADSVKGRFTISADNSKNTAYLQMNSLKPEDTAVYYCARVTNYDAFDIWGQGTLV |
| | | TVSS |
| 6A-51 | 3359 | EVQLVESGGGLVQPGGSLRLSCAASGYTYSSYVMGWFRQAPGKEREFVAAISRFGSTY |
| | | YADSVKGRFTISADNSKNTAYLQMNSLKPEDTAVYYCARDSGEHFWDSGYIDHWGQG |
| | | TLVTVSS |
| 6A-52 | 3360 | EVQLVESGGGLVQPGGSLRLSCAASGDTYGSYWMGWFRQAPGKEREVVAAITSGGST |
| | | VYADSVKGRFTISADNSKNTAYLQMNSLKPEDTAVYYCARVDSRFDYWGQGTLVTVS |
| | | S |
| 6A-53 | 3361 | EVQLVESGGGLVQPGGSLRLSCAASGISINTNVMGWFRQAPGKEREFVAAISTGSVTIY |
| | | ADSVKGRFTISADNSKNTAYLQMNSLKPEDTAVYYCARVDDFGYFDLWGQGTLVTVS |
| | | S |
| 6A-54 | 3362 | EVQLVESGGGLVQPGGSLRLSCAASGFEFENHWMGWFRQAPGKEREYVAHITAGGLS |
| | | NYADSVKGRFTISADNSKNTAYLQMNSLKPEDTAVYYCGRHWGIYDSSGFSSFDYWG |
| | | QGTLVTVSS |
| 6A-55 | 3363 | EVQLVESGGGLVQPGGSLRLSCAASGFTMSSSWMGWFRQAPGKEREFVARITSGGSTG |
| | | YADSVKGRFTISADNSKNTAYLQMNSLKPEDTAVYYCASVDGYFDYWGQGTLVTVSS |
| 6A-56 | 3364 | EVQLVESGGGLVQPGGSLRLSCAASGNIFRSNMGWFRQAPGKEREFVAGITWNGDTTY |
| | | YADSVKGRFTISADNSKNTAYLQMNSLKPEDTAVYYCARALGVTYQFDYWGQGTLV |
| | | TVSS |
| 6A-57 | 3365 | EVQLVESGGGLVQPGGSLRLSCAASGLTFDDHSMGWFRQAPGKEREFVAAVPLSGNT |
| | | YYADSVKGRFTISADNSKNTAYLQMNSLKPEDTAVYYCASFSGGPADFDYWGQGTLV |
| | | TVSS |
| 6A-58 | 3366 | EVQLVESGGGLVQPGGSLRLSCAASGRAVSTYAMGWFRQAPGKEREFVAAISGSENVT |
| | | SYADSVKGRFTISADNSKNTAYLQMNSLKPEDTAVYYCLSVTGDTEDYGVFDTWGQG |
| | | TLVTVSS |
| 6A-59 | 3367 | EVQLVESGGGLVQPGGSLRLSCAASGISGSVFSRTPMGWFRQAPGKEREWVSSIYSDGS |
| | | NTYYADSVKGRFTISADNSKNTAYLQMNSLKPEDTAVYYCAHWSWELGDWFDPWGQ |
| | | GTLVTVSS |
| 6A-60 | 3368 | EVQLVESGGGLVQPGGSLRLSCAASGDTYGSYWMGWFRQAPGKEREFVATISQSGAA |
| | | TAYADSVKGRFTISADNSKNTAYLQMNSLKPEDTAVYYCAGLLRYSGTYYDAFDVWG |
| | | QGTLVTVSS |
| 6A-61 | 3369 | EVQLVESGGGLVQPGGSLRLSCAASGDTYGSYWMGWFRQAPGKEREFVAAINWSGGS |
| | | TNYADSVKGRFTITADNNKNTAYLQMNSLKPEDTAVYYCAGLGWNYMDYWGQGTL |
| | | VTVSS |
| 6A-62 | 3370 | EVQLVESGGGLVQPGGSLRLSCAASGSTFSGNWMGWFRQAPGKEREFVAVISWTGGS |
| | | TYYADSVKGRFTISADNSKNTAYLQMNSLKPEDTAVYYCATHNSLSGFDYWGQGTLV |
| | | TVSS |
| 6A-63 | 3371 | EVQLVESGGGLVQPGGSLRLSCAASGQTFNMGWFRQAPGKEREFVAAIGSGGSTSYAD |
| | | SVKGRFTISADNSKNTAYLQMNSLKPEDTAVYYCWRLGNDYFDYWGQGTLVTVSS |
| 6A-64 | 3372 | EVQLVESGGGLVQPGGSLRLSCAASGIPSIHAMGWFRQAPGKERELVAAINWSHGVTY |
| | | YADSVKGRFTISADNSKNTAYLQMNSLKPEDTAVYYCGGGYGYHFDYWGQGTLVTV |
| | | SS |
| 6A-65 | 3373 | EVQLVESGGGLVQPGGSLRLSCAASGLPFSTLHMGWFRQAPGKEREFVASLSIFGATG |
| | | YADSVKGRFTISADNSKNTAYLQMNSLKPEDTAVYYCWMYYYDSSGYYGNYYYGM |
| | | DVWGQGTLVTVSS |
| 6A-66 | 3374 | EVQLVESGGGLVQPGGSLRLSCAASGLTFSLFAMGWFRQAPGKERELVAAISSGGSTD |
| | | YADSVKGRFTISADNSKNTAYLQMNSLKPEDTAVYYCARGNTKYYYDSSGYSSAFDY |
| | | WGQGTLVTVSS |
| 6A-67 | 3375 | EVQLVESGGGLVQPGGSLRLSCAASGSFSNYAMGWFRQAPGKEREFVAAISSSGALTS |
| | | YADSVKGRFTISADNSKNTAYLQMNSLKPEDTAVYYCWIVGPGPLDGMDVWGQGTL |
| | | VTVSS |
| 6A-68 | 3376 | EVQLVESGGGLVQPGGSLRLSCAASGFTLSDRAMGWFRQAPGKEREYVAHITAGGLS |
| | | NYADSVKGRFTISADNSKNTAYLQMNSLKPEDTAVYYCVHLASQTGAGYFDLWGQG |
| | | TLVTVSS |
| 6A-69 | 3377 | EVQLVESGGGLVQPGGSLRLSCAASGGTFSSVGMGWFRQAPGKEREFVAGISRSGGTY |
| | | YADSVKGRFTISADNSKNTAYLQMNSLKPEDTAVYYCARYDFWSGYPYWGQGTLVT |
| | | VSS |
| 6A-70 | 3378 | EVQLVESGGGLVQPGGSLRLSCAASGFNLDDYADMGWFRQAPGKEREFVAAIGWGG |
| | | GSTRYADSVKGRFTISADNSKNTAYLQMNSLKPEDTAVYYCAREILWFGEFGEPNVW |
| | | GQGTLVTVSS |
| 6A-71 | 3379 | EVQLVESGGGLVQPGGSLRLSCAASGITFSNDAMGWFRQAPGKEREFVAIITSSDTNDT |
| | | TNYADSVKGRFTISADNSKNTAYLQMNSLKPEDTAVYYCARLHYYDSSGYFDYWGQ |
| | | GTLVTVSS |
| 6A-72 | 3380 | EVQLVESGGGLVQPGGSLRLSCAASGSTLSINAMGWFRQAPGKEREFVAAIDWSGGST |
| | | AYADSVKGRFTISADNSKNTAYLQMNSLKPEDTAVYYCARDSSATRTGPDYWGQGTL |
| | | VTVSS |
| 6A-73 | 3381 | EVQLVESGGGLVQPGGSLRLSCAASGHTFSGYAMGWFRQAPGKEREFVAVITREGSTY |
| | | YADSVKGRFTISADNSKNTAYLQMNSLKPEDTAVYYCARLGGEGFDYWGQGTLVTVS |
| | | S |
| 6A-74 | 3382 | EVQLVESGGGLVQPGGSLRLSCAASGFAFGDSWMGWFRQAPGKERELVAAITSGGST |
| | | DYADSVKGRFTISADNSKNTAYLQMNSLKPEDTAVYYCARGLLWFGELFGYWGQGTL |
| | | VTVSS |
| 6A-75 | 3383 | EVQLVESGGGLVQPGGSLRLSCAASGGTFSTYWMGWFRQAPGKEREFVAAISRSGGN |
| | | TYYADSVKGRFTISADNSKNTAYLQMNSLKPEDTAVYYCVRHSGTDGDSSFDYWGQG |
| | | TLVTVSS |
| 6A-76 | 3384 | EVQLVESGGGLVQPGGSLRLSCAASGLAFDFDGMGWFRQAPGKEREGVAAINSGGST |
| | | YYADSVKGRFTISADNSKNTAYLQMNSLKPEDTAVYYCARFFRAHDYWGQGTLVTVS |
| | | S |
| 6A-77 | 3385 | EVQLVESGGGLVQPGGSLRLSCAASGFTFDRSWMGWFRQAPGKEREFVAAVTEGGTT |
| | | SYADSVKGRFTISADNSKNTAYLQMNSLKPEDTAVYYCARADYDFDYWGQGTLVTVS |
| | | S |
| 6A-78 | 3386 | EVQLVESGGGLVQPGGSLRLSCAASGRTYDAMGWFRQAPGKEREFVASVTSGGYTHY |
| | | ADSVKGRFTISADNSKNTAYLQMNSLKPEDTAVYYCAKFGRKIVGATELDYWGQGTL |
| | | VTVSS |
| 6A-79 | 3387 | EVQLVESGGGLVQPGGSLRLSCAASGSISSIDYMGWFRQAPGKEREGVSWISSSDGSTY |
| | | YADSVKGRFTISADNSKNTAYLQMNSLKPEDTAVYYCARSPSFSQIYYYYYMDVWGQ |
| | | GTLVTVSS |
| 6A-80 | 3388 | EVQLVESGGGLVQPGGSLRLSCAASGGTFSFYNMGWFRQAPGKEREFVAFISGNGGTS |
| | | YADSVKGRFTISADNSKNTAYLQMNSLKPEDTAVYYCAVVAMRMVTTEGPDVLDVW |
| | | GQGTLVTVSS |
| 6A-81 | 3389 | EVQLVESGGGLVQPGGSLRLSCAASGFIGNYHAMGWFRQAPGKEREFVAAVTWSGGT |
| | | TNYADSVKGRFTISADNSKNTAYLQMNSLKPEDTAVYYCAREGYYYDSSGYPYYFDY |
| | | WGQGTLVTVSS |
| 6A-82 | 3390 | EVQLVESGGGLVQPGGSLRLSCAASGSSLDAYGMGWFRQAPGKEREFVAAISWGGGSI |
| | | YYADSVKGRFTISADNSKNTAYLQMNSLKPEDTAVYYCARLSQGMVALDYWGQGTL |
| | | VTVSS |
| 6A-83 | 3391 | EVQLVESGGGLVQPGGSLRLSCAASGSIASIHAMGWFRQAPGKEREFVAAITWSGAITS |
| | | YADSVKGRFTISADNSKNTAYLQMNSLKPEDTAVYYCAKDGGYGELHYGMEVWGQG |
| | | TLVTVSS |
| 6A-84 | 3392 | EVQLVESGGGLVQPGGSLRLSCAASGFTPDDYAMGWFRQAPGKEREFVAAINSGGSYT |
| | | YYADSVKGRFTISADNSKNTAYLQMNSLKPEDTAVYYCARDRGPWGQGTLVTVSS |
| 6A-85 | 3393 | EVQLVESGGGLVQPGGSLRLSCAASGGTFSVFAMGWFRQAPGKEREFVSAINWSGGSL |
| | | LYADSVKGRFTISADNSKNTAYLQMNSLKPEDTAVYYCALFGDFDYWGQGTLVTVSS |
| 6A-86 | 3394 | EVQLVESGGGLVQPGGSLRLSCAASGPISGINRMGWFRQAPGKEREFVAVITSNGRPSY |
| | | ADSVKGRFTISADNSKNTAYLQMNSLKPEDTAVYYCVRLSSGYFDFDYWGQGTLVTV |
| | | SS |
| 6A-87 | 3395 | EVQLVESGGGLVQPGGSLRLSCAASGTSIMVGAMGWFRQAPGKEREFVAIIRGDGRTS |
| | | YADSVKGRFTISADNSKNTAYLQMNSLKPEDTAVYYCARFAGWDAFDIWGQGTLVTV |
| | | SS |
| 6A-88 | 3396 | EVQLVESGGGLVQPGGSLRLSCAASGRTFSTHWMGWFRQAPGKEREFVAVINWSGGSI |
| | | YYADSVKGRFTISADNSKNTAYLQMNSLKPEDTAVYYCARLSSDGYNYFDFWGQGTL |
| | | VTVSS |
| 6A-89 | 3397 | EVQLVESGGGLVQPGGSLRLSCAASGTIFASAMGWFRQAPGKEHQFVAVVNWNGSST |
| | | VYADNVKGRFTIIADNSKNTAYLQMNSLKPEDTAVYYCTTVDQYFNYWGQGTLVTVS |
| | | S |
| 6A-90 | 3398 | EVQLVESGGGLVQPGGSLRLSCAASGFPFSIWPMGWFRQAPGKEREFVAAVRWSSTYY |
| | | ADSVKGRFTISADNSKNTAYLQMNSLKPEDTAVYYCATGECDGGSCSLAYWGQGTLV |
| | | TVSS |
| 6A-91 | 3399 | EVQLVESGGGLVQPGGSLRLSCAASGRTFGNYAMGWFRQAPGKEREFVASISSSGVSK |
| | | HYADSVKGRFTISADNSKNTAYLQMNSLKPEDTAVYYCVRFGSSWARDLDQWGQGT |
| | | LVTVSS |
| 6A-92 | 3400 | EVQLVESGGGLVQPGGSLRLSCAASGFLFDSYASMGWFRQAPGKEREFVATIWRRGNT |
| | | YYANYADSVKGRFTISADNSKNTAYLQMNSLKPEDTAVYYCTETGTAAWGQGTLVTV |
| | | SS |
| 6A-93 | 3401 | EVQLVESGGGLVQPGGSLRLSCAASGLPFSTKSMGWFRQAPGKEREFVAAISMSGLTS |
| | | YADSVKGRFTISADNSKNTAYLQMNSLKPEDTAVYYCLKVLGGDYEADNWFDYWGQ |
| | | GTLVTVSS |
| 6A-94 | 3402 | EVQLVESGGGLVQPGGSLRLSCAASGNIFRIETMGWFRQAPGKEREFVAGIIRSGGETL |
| | | YADSVKGRFTISADNSKNTAYLQMNSLKPEDTAVYYCARSLYYDRSGSYYFDYWGQG |
| | | TLVTVSS |
| 6A-95 | 3403 | EVQLVESGGGLVQPGGSLRLSCAASGIPSSIRAMGWFRQAPGKEREFVAVIRWTGGST |
| | | YYADSVKGRFTISADNSKNTAYLQMNSLKPEDTAVYYCARDIGYYDSSGYYNDGGFD |
| | | YWGQGTLVTVSS |
| 6A-96 | 3404 | EVQLVESGGGLVQPGGSLRLSCAASGFTLSGNWMGWFRQAPGKEREFVAIITSGGRTN |
| | | YADSVKGRFTISADNSKNTAYLQMNSLKPEDTAVYYCAGHATFGGSSSSYYYGMDV |
| | | WGQGTLVTVSS |
| 6A-97 | 3405 | EVQLVESGGGLVQPGGSLRLSCAASGFTFSSLAMGWFRQAPGKEREFVAAITWSGDIT |
| | | NYADSVKGRFTITADNSKNTAYLQMNSLKPEDTAVYYCLRLSSSGFDHWGQGTLVTV |
| | | SS |
| 6A-98 | 3406 | EVQLVESGGGLVQPGGSLRLSCAASGTFGHYAMGWFRQAPGKEREFVAAINWSSRST |
| | | VYADSVKGRFTITADNSKNTAYLQMNSLKPEDTAVYYCAKSDGLMGELRSASAFDIW |
| | | GQGTLVTVSS |
| 6A-99 | 3407 | EVQLVESGGGLVQPGGSLRLSCAASGIPFRSRTMGWFRQAPGKEREFVAGISRSGASTA |
| | | YADSVKGRFTISADNSKNTAYLQMNSLKPEDTAVYYCTHANDYGDYWGQGTLVTVS |
| | | S |
| 6A-100 | 3408 | EVQLVESGGGLVQPGGSLRLSCAASGGTFSTSWMGWFRQAPGKEREYVAHITAGGLS |
| | | NYADSVKGRFTISADNSKNTAYLQMNSLKPEDTAVYYCARLLVREDWYFDLWGQGT |
| | | LVTVSS |
| 6A-101 | 3409 | EVQLVESGGGLVQPGGSLRLSCAASGGTFSLFAMGWFRQAPGKEREFVAAISWTGDST |
| | | YYKYYADSVKGRFTISADNSKNTAYLQMNSLKPEDTAVYYCAYNNSSGEYWGQGTL |
| | | VTVSS |
| 6A-102 | 3410 | EVQLVESGGGLVQPGGSLRLSCAASGSSFSAYAMGWFRQAPGKEREFVSAIDSEGTTT |
| | | YADSVKGRFTISADNSKNTAYLQMNSLKPEDTAVYYCAGDYNFWSGFDHWGQGTLV |
| | | TVSS |
| 6A-103 | 3411 | EVQLVESGGGLVQPGGSLRLSCAASGRTSSPIAMGWFRQAPGKEREPVAVRWSDDYT |
| | | YYADSVKGRFTISADNSKNTAYLQMNSLKPEDTAVYYCAKKLGGYYAFDIWGQGTLV |
| | | TVSS |
| 6A-104 | 3412 | EVQLVESGGGLVQPGGSLRLSCAASGLTFNQYTMGWFRQAPGKEREFVASITDGGSTY |
| | | YADSVKGRFTISADNSKNTAYLQMNSLKPEDTAVYYCARDSRYMDVWGQGTLVTVS |
| | | S |
| 6A-105 | 3413 | EVQLVESGGGLVQPGGSLRLSCAASGPTFSSMGWFRQAPGKEREFVAAISWDGGATA |
| | | YADSVKGRFTISADNSKNTAYLQMNSLKPEDTAVYYCAIEIVVGGIYWGQGTLVTVSS |
| 6A-106 | 3414 | EVQLVESGGGLVQPGGSLRLSCAASGIPSTLRAMGWFRQAPGKEREFVAATSWSGGSK |
| | | YYADSVKGRFTISADNSKNTAYLQMNSLKPEDTAVYYCATDLYYMDVWGQGTLVTV |
| | | SS |
| 6A-107 | 3415 | EVQLVESGGGLVQPGGSLRLSCAASGGVGFSVTNMGWFRQAPGKEREFVAVISSSSST |
| | | NYADSVKGRFTISADNSKNTAYLQMNSLKPEDTAVYYCTTFNWNDEGFDYWGQGTL |
| | | VTVSS |
| 6A-108 | 3416 | EVQLVESGGGLVQPGGSLRLSCAASGGTFGSYGMGWFRQAPGKEREFVAAIRWSGGIT |
| | | YYADSVKGRFTISADNSKNTAYLQMNSLKPEDTAVYYCARERYWNPLPYYYYGMDV |
| | | WGQGTLVTVSS |
| 6A-109 | 3417 | EVQLVESGGGLVQPGGSLRLSCAASGGTFSTYAMGWFRQVPGKEREFVASIDWSGLTS |
| | | YADSVKGRFTISADNSKNTAYLQMNSLKPEDTAVYYCARGPFYMYCSGTKCYSTNWF |
| | | DPWGQGTLVTVSS |
| 6A-110 | 3418 | EVQLVESGGGLVQPGGSLRLSCAASGPIYAVNRMGWFRQAPGKEREFVAGIWRSGGH |
| | | RDYADSVKGRFTISADNSKNTAYLQMNSLKPEDTAVYYCARGEIDILTGYWYDYWGQ |
| | | GTLVTVSS |
| 6A-111 | 3419 | EVQLVESGGGLVQPGGSLRLSCAASGFTFSNYWMGWFRQAPGKEREFVGGISRSGVST |
| | | SYADSVKGRFTISADNSKNTAYLQMNSLKPEDTAVYYCTTLLYYYDSSGYSFDAFDIW |
| | | GQGTLVTVSS |
| 6A-112 | 3420 | EVQLVESGGGLVQPGGSLRLSCAASGGTFSAYHMGWFRQAPGKERELVTIIDNGGPTS |
| | | YADSVKGRFTISADNSKNTAYLQMNSLKPEDTAVYYCTALLYYFDNSGYNFDPFDIWG |
| | | QGTLVTGSS |
| 2A-H1 | 3421 | EVQLLESGGGLVQPGGSLRLSCAASGFTFSNYATDWVRQAPGKGLEWVSIISGSGGAT |
| | | YYADSVKGRFTISRDNSKNTLYLQMNSLRAEDTAVYYCAKGGYCSSDTCWWEYWLD |
| | | PWGQGTLVTVSS |
| 2A-H2 | 3422 | EVQLLESGGGLVQPGGSLRLSCAASGFTFSAFAMGWVRQAPGKGLEWVSAITASGDIT |
| | | YYADSVKGRFTISRDNSKNTLYLQMNSLRAEDTAVYYCARQSDGLPSPWHFDLGGQG |
| | | TLVTVSS |
| 2A-H3 | 3423 | EVQLLESGGGLVQPGGSLRLSCAASGFTFSDFAMAWVRQAPGKGLEWVSAISGSGDIT |
| | | YYADSVKGRFTISRDNSKNTLYLQMNSLRAEDTAVYYCAREADGLHSPWHFDLWGQ |
| | | GTLVTVSS |
| 2A-H4 | 3424 | EVQLLESGGGLVQPGGSLRLSCAASGFTFSRHAMNWVRQAPGKGLEWVSGISGSGDET |
| | | YYADSVKGRFTISRDNSKNTLYLQMNSLRAEDTAVYYCARDLPASYYDSSGYYWHNG |
| | | MDVWGQGTLVTVSS |
| 2A-H5 | 3425 | EVQLLESGGGLVQPGGSLRLSCAASGFTFSDFAMAWVRQAPGKGLEWVSAISGSGDIT |
| | | YYADSVKGRFTISRDNSKNTLYLQMNSLRAEDTAVYYCAREADCLPSPWYLDLWGQG |
| | | TLVTVSS |
| 2A-H6 | 3426 | EVQLLESGGGLVQPGGSLRLSCAASGFTFSDFAMAWVRQAPGKGLEWVSAISGSGDIT |
| | | YYADSVKGRFTISRDNSKNTLYLQMNSLRAEDTAVYYCAREADGLHSPWHFDLWGQ |
| | | GTLVTVSS |
| 2A-H7 | 3427 | EVQLLESGGGLVQPGGSLRLSCAASGFTFSNYPMNWVRQAPGKGLEWVSTISGSGGNT |
| | | FYADSVKGRFTISRDNSKNTLYLQMNSLRAEDTAVYYCVRHDEYSFDYWGQGTLVTV |
| | | SS |
| 2A-H8 | 3428 | EVQLLESGGGLVQPGGSLRLSCAASGFTFSDFAMAWVRQAPGKGLEWVSAITGSGDIT |
| | | YYADSVKGRFTISRDNSKNTLYLQMNSLRAEDTAVYYCAREADGLHSPWHFDLWGQ |
| | | GTLVTVSS |
| 2A-H9 | 3429 | EVQLLESGGGLVQPGGSLRLSCAASGFTFSDYPMNWVRQAPGKGLEWVSTISGSGGIT |
| | | FYADSVKGRFTISRDNSKNTLYLQMNSLRAEDTAVYYCVRHDEYSFDYWGQGTLVTV |
| | | SS |
| 2A-H10 | 3430 | EVQLLESGGGLVQPGGSLRLSCAASGFTFSDYPMNWVRQAPGKGLEWVSAISGSGDNT |
| | | YYADSVKGRFTISRDNSKNTLYLQMNSLRAEDTAVYYCVRHDEYSFDYWGQGTLVTV |
| | | SS |
| 2A-H11 | 3431 | EVQLLESGGGLVQPGGSLRLSCAASGFTFSDFAMAWVRQAPGKGLEWVSAITGTGDIT |
| | | YYADSVKGRFTISRDNSKNTLYLQMNSLRAEDTAVYYCAREADGLHSPWGQGTLVTV |
| | | SS |
| 2A-H12 | 3432 | EVQLLESGGGLVQPGGSLRLSCAASGFTFSDYPMNWVRQAPGKGLEWVSAITGSGDIT |
| | | YYADSVKGRFTISRDNSKNTLYLQMNSLRAEDTAVYYCVRHDEYSFDYWGQGTLVTV |
| | | SS |
| 2A-H13 | 3433 | EVQLLESGGGLVQPGGSLRLSCAASGFTFSDFAMAWVRQAPGKGLEWVSAISGSGDIT |
| | | YYADSVKGRFTISRDNSKNTLYLQMNSLRAEDTAVYYCAREADGLHSPWHFDLWGQ |
| | | GTLVTVSS |
| 2A-H14 | 3434 | EVQLLESGGGLVQPGGSLRLSCAASGFTFSDFAMAWVRQAPGKGLEWVSAISGSGDIT |
| | | YYADSVKGRFTISRDNSKNTLYLQMNSLRAEDTAVYYCAREADGLHSPWHFDLWGQ |
| | | GTLVTVSS |
| 2A-H15 | 3435 | EVQLLESGGGLVQPGGSLRLSCAASGFTFPRYAMSWVRQAPGKGLEWVSTISGSGSTT |
| | | YYADSVKGRFTISRDNSKNTLYLQMNSLRAEDTAVYYCARLIDAFDIWGQGTLVTVSS |
| 2A-L1 | 3436 | DIQMTQSPSSLSASVGDRVTITCRASQSIHRFLNWYQQKPGKAPKLLIYAASNLHSGVPS |
| | | RFSGSGSGTDFTLTISSLQPEDFATYYCQQSYGLPPTFGQGTKVEIK |
| 2A-L2 | 3437 | DIQMTQSPSSLSASVGDRVTITCRASQSIHISLNWYQQKPGKAPKLLIYLASPLASGVPS |
| | | RFSGSGSGTDFTLTISSLQPEDFATYYCQQSYSAPPYTFGQGTKVEIK |
| 2A-L3 | 3438 | DIQMTQSPSSLSASVGDRVTITCRASQSIHTYLNWYQQKPGKAPKLLIYAASALASGVP |
| | | SRFSGSGSGTDFTLTISSLQPEDFATYYCQQSYSAPPYTFGQGTKVEIK |
| 2A-L4 | 3439 | DIQMTQSPSSLSASVGDRVTITCRASQTINTYLNWYQQKPGKAPKLLIYSASTLQSGVPS |
| | | RFSGSGSGTDFTLTISSLQPEDFATYYCQQSYSTFTFGQGTKVEIK |
| 2A-L5 | 3440 | DIQMTQSPSSLSASVGDRVTITCRASQNIHTYLNWYQQKPGKAPKLLIYAASTFAKGVP |
| | | SRFSGSGSGTDFTLTISSLQPEDFATYYCQQSYSAPPYTFGQGTKVEIK |
| 2A-L6 | 3441 | DIQMTQSPSSLSASVGDRVTITCRASQSIDTYLNWYQQKPGKAPKLLIYAASALASGVP |
| | | SRFSGSGSGTDFTLTISSLQPEDFATYYCQQSYSAPPYTFGQGTKVEIK |
| 2A-L7 | 3442 | DIQMTQSPSSLSASVGDRVTITCRASQSIGNYLNWYQQKPGKAPKLLIYGVSSLQSGVP |
| | | SRFSGSGSGTDFTLTISSLQPEDFATYYCQQSHSAPLTFGQGTKVEIK |
| 2A-L8 | 3443 | DIQMTQSPSSLSASVGDRVTITCRASQSIDTYLNWYQQKPGKAPKLLIYAASALASGVP |
| | | SRFSGSGSGTDFTLTISSLQPEDFATYYCQQSYSAPPYTFGQGTKVEIK |
| 2A-L9 | 3444 | DIQMTQSPSSLSASVGDRVTITCRASQSIDNYLNWYQQKPGKAPKLLIYGVSALQSGVP |
| | | SRFSGSGSGTDFTLTISSLQPEDFATYYCQQSHSAPPYFFGQGTKVEIK |
| 2A-L10 | 3445 | DIQMTQSPSSLSASVGDRVTITCRASQSIDTYLNWYQQKPGKAPKLLIYGASALESGVPS |
| | | RFSGSGSGTDFTLTISSLQPEDFATYYCQQSHSAPPYFFGQGTKVEIK |
| 2A-L11 | 3446 | DIQMTQSPSSLSASVGDRVTITCRASQSIDTYLNWYQQKPGKAPKLLIYAASALASGVP |
| | | SRFSGSGSGTDFTLTISSLQPEDFATYYCQQSYSAPPYTFGQGTKVEIK |
| 2A-L12 | 3447 | DIQMTQSPSSLSASVGDRVTITCRASQSIDTYLNWYQQKPGKAPKLLIYGVSALQSGVP |
| | | SRFSGSGSGTDFTLTISSLQPEDFATYYCQQSYSAPPYFFGQGTKVEIK |
| 2A-L13 | 3448 | DIQMTQSPSSLSASVGDRVTITCRASQSIDTYLNWYQQKPGKAPKLLIYAASALASGVP |
| | | SRFSGSGSGTDFTLTISSLQPEDFATYYCQQSYSAPPYTFGQGTKVEIK |
| 2A-L14 | 3449 | DIQMTQSPSSLSASVGDRVTITCRASQSIDNYLNWYQQKPGKAPKLLIYGVSALQSGVP |
| | | SRFSGSGSGTDFTLTISSLQPEDFATYYCQQSHSAPLTFGQGTKVEIK |
| 2A-L15 | 3450 | DIQMTQSPSSLSASVGDRVTITCRASQRIGTYLNWYQQKPGKAPKLLIYAASNLEGGVP |
| | | SRFSGSGSGTDFTLTISSLQPEDFATYYCQQNYSTTWTFGQGTKVEIK |
| 2A-H16 | 3451 | EVQLLESGGGLVQPGGSLRLSCAASGFTFSSYAMSWVRQAPGKGLEWVSVISGSGGST |
| | | YYADSVKGRFTISRDNSKNTLYLQMNSLRAEDTAVYYCAREGYRDYLWYFDLWGQG |
| | | TLVTVSS |
| 2A-H17 | 3452 | EVQLLESGGGLVQPGGSLRLSCAASGFTFSNYAMSWVRQAPGKGLEWVSAISGSAGST |
| | | YYADSVKGRFTISRDNSKNTLYLQMNSLRAEDTAVYYCARVRQGLRRTWYYFDYWG |
| | | QGTLVTVSS |
| 2A-H18 | 3453 | EVQLLESGGGLVQPGGSLRLSCAASGFTFSSYAMYWVRQAPGKGLEWVSAISGSAGST |
| | | YYADSVKGRFTISRDNSKNTLYLQMNSLRAEDTAVYYCARDTNDFWSGYSIFDPWGQ |
| | | GTLVTVSS |
| 2A-H19 | 3454 | EVQLLESGGGLVQPGGSLRLSCAASGFTFSSYTMSWVRQAPGKGLEWVSVISGSGGST |
| | | YYADSVKGRFTISRDNSKNTLYLQMNSLRAEDTAVYYCAREGYRDYLWYFDLWGQG |
| | | TLVTVSS |
| 2A-H20 | 3455 | EVQLLESGGGLVQPGGSLRLSCAASGFTFSSYDMSWVRQAPGKGLEWVSVISGSGGST |
| | | YYADSVKGRFTISRDNSKNTLYLQMNSLRAEDTAVYYCAKGPLVGWYFDLWGQGTL |
| | | VTVSS |
| 2A-L16 | 3456 | DIQMTQSPSSLSASVGDRVTITCTGTSSDVGSYDLVSWYQQKPGKAPKLLIYEGNKRPS |
| | | GVPSRFSGSGSGTDFTLTISSLQPEDFATYYCCSYAGSSVVFGQGTKVEIK |
| 2A-L17 | 3457 | DIQMTQSPSSLSASVGDRVTITCTGTSSDVGSSNLVSWYQQKPGKAPKLLIYEGSKRPS |
| | | GVPSRFSGSGSGTDFTLTISSLQPEDFATYYCCSYAGSLYVFGQGTKVEIK |
| 2A-L18 | 3458 | DIQMTQSPSSLSASVGDRVTITCTGTSSDIGSYNLVSWYQQKPGKAPKLLIYEGTKRPSG |
| | | VPSRFSGSGSGTDFTLTISSLQPEDFATYYCCSYAGSRTYVFGQGTKVEIK |
| 2A-L19 | 3459 | DIQMTQSPSSLSASVGDRVTITCTGTSTDVGSYNLVSWYQQKPGKAPKLLIYEGTKRPS |
| | | GVPSRFSGSGSGTDFTLTISSLQPEDFATYYCCSYAGSYTSVVFGQGTKVEIK |
| 2A-L20 | 3460 | DIQMTQSPSSLSASVGDRVTITCTGTSSNVGSYNLVSWYQQKPGKAPKLLIYEGTKRPS |
| | | GVPSRFSGSGSGTDFTLTISSLQPEDFATYYCCSYAGSSSFVVFGQGTKVEIK |
| 3A-H1 | 3461 | EVQLLESGGGLVQPGGSLRLSCAASGFTFRSHAMSWVRQAPGKGLEWVSSISGGGAST |
| | | YYADSVKGRFTISRDNSKNTLYLQMNSLRAEDTAVYYCARVKYLTTSSGWPRPYFDN |
| | | WGQGTLVTVSS |
| 3A-H2 | 3462 | EVQLLESGGGLVQPGGSLRLSCAASGFTFSAYSMSWVRQAPGKGLEWVSAISGSGGSR |
| | | YYADSVKGRFTISRDNSKNTLYLQMNSLRAEDTAVYYCGRSKWPQANGAFDIWGQGT |
| | | LVTVSS |
| 3A-H3 | 3463 | EVQLLESGGGLVQPGGSLRLSCAASGFMFGNYAMSWVRQAPGKGLEWVAAISGSGGS |
| | | TYYADSVKGRFTISRDNSKNTLYLQMNSLRAEDTAVYYCAKDRGYSSSWYGGFDYW |
| | | GQGTLVTVSS |
| 3A-H4 | 3464 | EVQLLESGGGLVQPGGSLRLSCAASGFTFRNHAMAWVRQAPGKGLEWVSGISGSGGT |
| | | TYYGDSVKGRFTISRDNSKNTLYLQMNSLRAEDTAVYYCARGTRFLQWSLPLDVWGQ |
| | | GTLVTVSS |
| 3A-H5 | 3465 | EVQLLESGGGLVQPGGSLRLSCAASGFTIPNYAMSWVRQAPGKGLEWVSGISGAGAST |
| | | YYADSVKGRFTISRDNSKNTLYLQMNSLRAEDTAVYYCARHTWWKGAGFFDHWGQG |
| | | TLVTVSS |
| 3A-H6 | 3466 | EVQLLESGGGLVQPGGSLRLSCAASGFTFRNYAMAWVRQAPGKGLEWVSGISGSGGT |
| | | TYYGDSVKGRFTISRDNSKNTLYLQMNSLRAEDTAVYYCARGTRFLEWSLPLDVWGQ |
| | | GTLVTVSS |
| 3A-H7 | 3467 | EVQLLESGGGLVQPGGSLRLSCAASGFTIRNYAMSWVRQAPGKGLEWVSSISGGGAST |
| | | YYADSVKGRFTISRDNSKNTLYLQMNSLRAEDTAVYYCARVKYLTTSSGWPRPYFDN |
| | | WGQGTLVTVSS |
| 3A-H8 | 3468 | EVQLLESGGGLVQPGGSLRLSCAASGFTIPNYAMSWVRQAPGKGLEWVSGISGSGAST |
| | | YYADSVKGRFTISRDNSKNTLYLQMNSLRAEDTAVYYCARHTWWKGAGFFDHWGQG |
| | | TLVTVSS |
| 3A-H9 | 3469 | EVQLLESGGGLVQPGGSLRLSCAASGFTITNYAMSWVRQAPGKGLEWVSGISGSGAGT |
| | | YYADSVKGRFTISRDNSKNTLYLQMNSLRAEDTAVYYCARHAWWKGAGFFDHWGQ |
| | | GTLVTVSS |
| 3A-H10 | 3470 | EVQLLESGGGLVQPGGSLRLSCAASGFTFRSHAMSWVRQAPGKGLEWVSSISGGGAST |
| | | YYADSVKGRFTISRDNSKNTLYLQMNSLRAEDTAVYYCARVKYLTTSSGWPRPYFDN |
| | | WGQGTLVTVSS |
| 3A-H11 | 3471 | EVQLLESGGGLVQPGGSLRLSCAASGFTITNYAMSWVRQAPGKGLEWVSGISGSGAST |
| | | YYADSVKGRFTISRDNSKNTLYLQMNSLRAEDTAVYYCARHTWWKGAGFFDHWGQG |
| | | TLVTVSS |
| 3A-H12 | 3472 | EVQLLESGGGLVQPGGSLRLSCAASGFTFRSHAMNWVRQAPGKGLEWVSAISGSGGST |
| | | NYADSVKGRFTISRDNSKNTLYLQMNSLRAEDTAVYYCARGLKFLEWLPSAFDIWGQ |
| | | GTLVTVSS |
| 3A-H13 | 3473 | EVQLLESGGGLVQPGGSLRLSCAASGFTFRSHAMSWVRQAPGKGLEWVSSISGGGAST |
| | | YYADSVKGRFTISRDNSKNTLYLQMNSLRAEDTAVYYCARVKYLTTSSGWPRPYFDN |
| | | WGQGTLVTVSS |
| 3A-H14 | 3474 | EVQLLESGGGLVQPGGSLRLSCAASGFTFRSYAMSWVRQAPGKGLEWVSSISGGGAST |
| | | YYADSVKGRFTISRDNSKNTLYLQMNSLRAEDTAVYYCARVKYLTTSSGWPRPYFDN |
| | | WGQGTLVTVSS |
| 3A-H15 | 3475 | EVQLLESGGGLVQPGGSLRLSCAASGFTITNYAMSWVRQAPGKGLEWVSGISGSGAGT |
| | | YYADSVKGRFTISRDNSKNTLYLQMNSLRAEDTAVYYCARHTWWKGAGFFDHWGQG |
| | | TLVTVSS |
| 3A-L1 | 3476 | DIQMTQSPSSLSASVGDRVTITCRASQSIRKYLNWYQQKPGKAPKLLIYASSTLQRGVPS |
| | | RFSGSGSGTDFTLTISSLQPEDFATYYCQQSLSTPFTFGQGTKVEIK |
| 3A-L2 | 3477 | DIQMTQSPSSLSASVGDRVTITCRASQNIKTYLNWYQQKPGKAPKLLIYAASKLQSGVP |
| | | SRFSGSGSGTDFTLTISSLQPEDFATYYCQQSYSTSPTFGQGTKVEIK |
| 3A-L3 | 3478 | DIQMTQSPSSLSASVGDRVTITCRASQTIYSYLNWYQQKPGKAPKLLIYATSTLQGGVP |
| | | SRFSGSGSGTDFTLTISSLQPEDFATYYCQHRGTFGQGTKVEIK |
| 3A-L4 | 3479 | DIQMTQSPSSLSASVGDRVTITCRASRSIRRYLNWYQQKPGKAPKLLIYASSSLQAGVPS |
| | | RFSGSGSGTDFTLTISSLQPEDFATYYCQQSYSTLLTFGQGTKVEIK |
| 3A-L5 | 3480 | DIQMTQSPSSLSASVGDRVTITCRASQSIGKYLNWYQQKPGKAPKLLIYASSSLQSGVPS |
| | | RFSGSGSGTDFTLTISSLQPEDFATYYCQQSYSPPFTFGQGTKVEIK |
| 3A-L6 | 3481 | DIQMTQSPSSLSASVGDRVTITCRASRSISRYLNWYQQKPGKAPKLLIYAASSLQAGVPS |
| | | RFSGSGSGTDFTLTISSLQPEDFATYYCQQSYSSLLTFGQGTKVEIK |
| 3A-L7 | 3482 | DIQMTQSPSSLSASVGDRVTITCRASQSIGKYLNWYQQKPGKAPKLLIYASSTLQRGVP |
| | | SRFSGSGSGTDFTLTISSLQPEDFATYYCQQSLSPPFTFGQGTKVEIK |
| 3A-L8 | 3483 | DIQMTQSPSSLSASVGDRVTITCRASQSIGRYLNWYQQKPGKAPKLLIYASSSLQSGVPS |
| | | RFSGSGSGTDFTLTISSLQPEDFATYYCQQSYSLPRTFGQGTKVEIK |
| 3A-L9 | 3484 | DIQMTQSPSSLSASVGDRVTITCRASQSIGRYLNWYQQKPGKAPKLLIYAASSLKSGVPS |
| | | RFSGSGSGTDFTLTISSLQPEDFATYYCQQSYSLPRTFGQGTKVEIK |
| 3A-L10 | 3485 | DIQMTQSPSSLSASVGDRVTITCRASQSIGKYLNWYQQKPGKAPKLLIYASSTLQRGVP |
| | | SRFSGSGSGTDFTLTISSLQPEDFATYYCQQSLSTPFTFGQGTKVEIK |
| 3A-L11 | 3486 | DIQMTQSPSSLSASVGDRVTITCRASQSIGRYLNWYQQKPGKAPKLLIYAASSLKSGVPS |
| | | RFSGSGSGTDFTLTISSLQPEDFATYYCQQSYSLPLTFGQGTKVEIK |
| 3A-L12 | 3487 | DIQMTQSPSSLSASVGDRVTITCRTSQSINTYLNWYQQKPGKAPKLLIYGASNVQSGVP |
| | | SRFSGSGSGTDFTLTISSLQPEDFATYYCQQSYRIPRTFGQGTKVEIK |
| 3A-L13 | 3488 | DIQMTQSPSSLSASVGDRVTITCRASQSIGKYLNWYQQKPGKAPKLLIYASSTLQRGVP |
| | | SRFSGSGSGTDFTLTISSLQPEDFATYYCQQSFSPPFTFGQGTKVEIK |
| 3A-L14 | 3489 | DIQMTQSPSSLSASVGDRVTITCRASQSIGKYLNWYQQKPGKAPKLLIYASSTLQRGVP |
| | | SRFSGSGSGTDFTLTISSLQPEDFATYYCQQSFSTPFTFGQGTKVEIK |
| 3A-L15 | 3490 | DIQMTQSPSSLSASVGDRVTITCRASQSIGRYLNWYQQKPGKAPKLLIYAASSLKSGVPS |
| | | RFSGSGSGTDFTLTISSLQPEDFATYYCQQSYSLPRTFGQGTKVEIK |
| 3A-H16 | 3491 | EVQLLESGGGLVQPGGSLRLSCAASGFTFTNFAMSWVRQAPGKGLEWVSAISGRGGGT |
| | | YYADSVKGRFTISRDNSKNTLYLQMNSLRAEDTAVYYCARDAHGYYYDSSGYDDWG |
| | | QGTLVTVSS |
| 3A-H17 | 3492 | EVQLLESGGGLVQPGGSLRLSCAASGFTFRSYPMSWVRQAPGKGLEWVSTISGSGGITY |
| | | YADSVKGRFTISRDNSKNTLYLQMNSLRAEDTAVYYCAKGVYGSTVTTCHWGQGTLV |
| | | TVSS |
| 3A-H18 | 3493 | EVQLLESGGGLVQPGGSLRLSCAASGFTLTSYAMSWVRQAPGKGLEWVSAISGSGVDT |
| | | YYADSVKGRFTISRDNSKNTLYLQMNSLRAEDTAVYYCARPTNWGFDYWGQGTLVT |
| | | VSS |
| 3A-H19 | 3494 | EVQLLESGGGLVQPGGSLRLSCAASGFTFINYAMSWVRQAPGKGLEWVSTISTSGGNT |
| | | YYADSVKGRFTISRDNSKNTLYLQMNSLRAEDTAVYYCARADSNWASSAYWGQGTL |
| | | VTVSS |
| 3A-H20 | 3495 | EVQLLESGGGLVQPGGSLRLSCAASGFPFSTYAMSWVRQAPGKGLEWVSGISVSGGFT |
| | | YYADSVKGRFTISRDNSKNTLYLQMNSLRAEDTAVYYCARDPYSYGYYYYYGMDVW |
| | | GQGTLVTVSS |
| 3A-H21 | 3496 | EVQLLESGGGLVQPGGSLRLSCAASGFTFSTYAMGWVRQAPGKGLEWVSGISGGGVS |
| | | TYYADSVKGRFTISRDNSKNTLYLQMNSLRAEDTAVYYCARARNWGPSDYWGQGTL |
| | | VTVSS |
| 3A-H22 | 3497 | EVQLLESGGGLVQPGGSLRLSCAASGFIFSDYAMTWVRQAPGKGLEWVSAISGSAFYA |
| | | DSVKGRFTISRDNSKNTLYLQMNSLRAEDTAVYYCARDATYSSSWYNWFDPWGQGTL |
| | | VTVSS |
| 3A-H23 | 3498 | EVQLLESGGGLVQPGGSLRLSCAASGFTFSDYAMTWVRQAPGKGLEWVSDISGSGGST |
| | | YYADSVKGRFTISRDNSKNTLYLQMNSLRAEDTAVYYCARGTVTSFDFWGQGTLVTV |
| | | SS |
| 3A-H24 | 3499 | EVQLLESGGGLVQPGGSLRLSCAASGFTFSIYAMGWVRQAPGKGLEWVSFISGSGGST |
| | | YYADSVKGRFTISRDNSKNTLYLQMNSLRAEDTAVYYCAKDYHSASWFSAAADYWG |
| | | QGTLVTVSS |
| 3A-H25 | 3500 | EVQLLESGGGLVQPGGSLRLSCAASGFTFASYAMTWVRQAPGKGLEWVSAISESGGST |
| | | YYADSVKGRFTISRDNSKNTLYLQMNSLRAEDTAVYYCAREGQEYSSGSSYFDYWGQ |
| | | GTLVTVSS |
| 3A-H26 | 3501 | EVQLLESGGGLVQPGGSLRLSCAASGFTFSEYAMSWVRQAPGKGLEWVSAITGSGGST |
| | | YYGDSVKGRFTISRDNSKNTLYLQMNSLRAEDTAVYYCARGSQTPYCGGDCPETFDY |
| | | WGQGTLVTVSS |
| 3A-H27 | 3502 | EVQLLESGGGLVQPGGSLRLSCAASGFTFDDYAMSWVRQAPGKGLEWVSGISGGGTS |
| | | TYYADSVKGRFTISRDNSKNTLYLQMNSLRAEDTAVYYCARDLYSSGWYGFDYWGQ |
| | | GTLVTVSS |
| 3A-H28 | 3503 | EVQLLESGGGLVQPGGSLRLSCAASGFTFNNYAMNWVRQAPGKGLEWVSAISGSVGS |
| | | TYYADSVKGRFTISRDNSKNTLYLQMNSLRAEDTAVYYCARDNYDFWSGYYTNWFD |
| | | PWGQGTLVTVSS |
| 3A-H29 | 3504 | EVQLLESGGGLVQPGGSLRLSCAASGFTFTNHAMSWVRQAPGKGLEWVSAISGSGSNI |
| | | YYADSVKGRFTISRDNSKNTLYLQMNSLRAEDTAVYYCARDSLSVTMGRGVVTYYYY |
| | | GMDFWGQGTLVTVSS |
| 3A-L16 | 3505 | DIQMTQSPSSLSASVGDRVTITCRASQIIGSYLNWYQQKPGKAPKLLIYTTSNLQSGVPS |
| | | RFSGSGSGTDFTLTISSLQPEDFATYYCQQSYITPWTFGQGTKVEIK |
| 3A-L17 | 3506 | DIQMTQSPSSLSASVGDRVTITCRASQSISRYINWYQQKPGKAPKLLIYEASSLESGVPSR |
| | | FSGSGSGTDFTLTISSLQPEDFATYYCQQSHITPLTFGQGTKVEIK |
| 3A-L18 | 3507 | DIQMTQSPSSLSASVGDRVTITCRASQSIYTYLNWYQQKPGKAPKLLIYSASNLHSGVPS |
| | | RFSGSGSGTDFTLTISSLQPEDFATYYCQQSDTTPWTFGQGTKVEIK |
| 3A-L19 | 3508 | DIQMTQSPSSLSASVGDRVTITCRASQSIATYLNWYQQKPGKAPKLLIYGASSLEGGVPS |
| | | RFSGSGSGTDFTLTISSLQPEDFATYYCQQTFSSPFTFGQGTKVEIK |
| 3A-L20 | 3509 | DIQMTQSPSSLSASVGDRVTITCRASQNINTYLNWYQQKPGKAPKLLIYSASSLQSGVPS |
| | | RFSGSGSGTDFTLTISSLQPEDFATYYCQQSSLTPWTFGQGTKVEIK |
| 3A-L21 | 3510 | DIQMTQSPSSLSASVGDRVTITCRASQGIATYLNWYQQKPGKAPKLLIYYASNLQSGVP |
| | | SRFSGSGSGTDFTLTISSLQPEDFATYYCQQSYSTRFTFGQGTKVEIK |
| 3A-L22 | 3511 | DIQMTQSPSSLSASVGDRVTITCRASERISNYLNWYQQKPGKAPKLLIYTASNLESGVPS |
| | | RFSGSGSGTDFTLTISSLQPEDFATYYCQQSYTPPRTFGQGTKVEIK |
| 3A-L23 | 3512 | DIQMTQSPSSLSASVGDRVTITCRASQSISSSLNWYQQKPGKAPKLLIYAASRLQDGVPS |
| | | RFSGSGSGTDFTLTISSLQPEDFATYYCQQSYSTPRSFGQGTKVEIK |
| 3A-L24 | 3513 | DIQMTQSPSSLSASVGDRVTITCRASQSISSHLNWYQQKPGKAPKLLIYRASTLQSGVPS |
| | | RFSGSGSGTDFTLTISSLQPEDFATYYCQQTYNTPQTFGQGTKVEIK |
| 3A-L25 | 3514 | DIQMTQSPSSLSASVGDRVTITCRASQSISSYLIWYQQKPGKAPKLLIYAASRLHSGVPS |
| | | RFSGSGSGTDFTLTISSLQPEDFATYYCQQGYNTPRTFGQGTKVEIK |
| 3A-L26 | 3515 | DIQMTQSPSSLSASVGDRVTITCRASPSISTYLNWYQQKPGKAPKLLIYTASRLQTGVPS |
| | | RFSGSGSGTDFTLTISSLQPEDFATYYCQQTYSTPSSFGQGTKVEIK |
| 3A-L27 | 3516 | DIQMTQSPSSLSASVGDRVTITCRASQNIAKYLNWYQQKPGKAPKLLIYGASGLQSGVP |
| | | SRFSGSGSGTDFTLTISSLQPEDFATYYCQQSHSPPITFGQGTKVEIK |
| 3A-L28 | 3517 | DIQMTQSPSSLSASVGDRVTITCRASQSIGTYLNWYQQKPGKAPKLLIYAASNLHSGVP |
| | | SRFSGSGSGTDFTLTISSLQPEDFATYYCQESYSAPYTFGQGTKVEIK |
| 3A-L29 | 3518 | DIQMTQSPSSLSASVGDRVTITCRASQSISPYLNWYQQKPGKAPKLLIYKASSLQSGVPS |
| | | RFSGSGSGTDFTLTISSLQPEDFATYYCQQSSSTPYTFGQGTKVEIK |
| 4A-H51 | 3519 | EVQLVESGGGLVQPGGSLRLSCAASGPGTAIMGWFRQAPGKEREFVARISTSGGSTKY |
| | | ADSVKGRFTISADNSKNTAYLQMNSLKPEDTAVYYCARTTVTTPPLIWGQGTLVTVSS |
| 4A-H52 | 3520 | EVQLVESGGGLVQPGGSLRLSCAASGRSFSNSVMGWFRQAPGKEREFVARITWNGGST |
| | | YYADSVKGRFTISADNSKNTAYLQMNSLKPEDTAVYYCATTENPNPRWGQGTLVTVS |
| | | S |
| 4A-H53 | 3521 | EVQLVESGGGLVQPGGSLRLSCAASGRTFGDDTMGWFRQAPGKEREFVAAVSWSGSG |
| | | VYYADSVKGRFTITADNSKNTAYLQMNSLKPENTAVYYCATDPPLFWGQGTLVTVSS |
| 4A-H54 | 3522 | EVQLVESGGGLVQPGGSLRLSCAASGRTFSDARMGWFRQAPGKEREFVGAVSWSGGT |
| | | TVYADSVKGRFTISADNSKNTAYLQMNSLKPEDTAVYYCATTEDPYPRWGQGTLVTV |
| | | SS |
| 4A-H49 | 3523 | EVQLVESGGGLVQPGGSLRLSCAASGRTFGDYIMGWFRQAPGKERESVAAINWSAGY |
| | | TAYADSVKGRFTISADNSKNTAYLQMNSLKPEDTAVYYCARASPNTGWHFDHWGQG |
| | | TLVTVSS |
| 4A-H55 | 3524 | EVQLVESGGGLVQPGGSLRLSCAASGSGLSINAMGWFRQAPGKERESVAAISWSGGST |
| | | YTAYADSVKGRFTISADNSKNTAYLQMNSLKPEDTAVYYCAAYQAGWGDWGQGTLV |
| | | TVSS |
| 4A-H39 | 3525 | EVQLVESGGGLVQPGGSLRLSCAASGRTFSNAAMGWFRQAPGKEREFVARILWTGAS |
| | | RNYADSVKGRFTISADNSKNTAYLQMNSLKPEDTAVYYCATTENPNPRWGQGTLVTV |
| | | SS |
| 4A-H56 | 3526 | EVQLVESGGGLVQPGGSLRLSCAASGFSLDYYGMGWFRQAPGKERESVAAISWNGDF |
| | | TAYADSVKGRFTISADNSKNTAYLQMNSLKPEDTAVYYCAKRANPTGAYFDYWGQG |
| | | TLVTVSS |
| 4A-H33 | 3527 | EVQLVESGGGLVQPGGSLRLSCAASGFTFSRHDMGWFRQAPGKEREFVAGINWESGST |
| | | NYADSVKGRFTISADNSKNTAYLQMNSLKPEDTAVYYCAADRGVYGGRWYRTSQYT |
| | | WGQGTLVTVSS |
| 4A-H57 | 3528 | EVQLVESGGGLVQPGGSLRLSCAASGLTFRNYAMGWFRQAPGKEREFVAAIGSGGYT |
| | | DYADSVKGRFTISADNSKNTAYLQMNSLKPEDTAVYYCAVKPGWVARDPSQYNWGQ |
| | | GTLVTVSS |
| 4A-H25 | 3529 | EVQLVESGGGLVQPGGSLRLSCAASGGTFSRYAMGWFRQAPGKEREWVSAVDSGGST |
| | | YYADSVKGRFTISADNSKNTAYLQMNSLKPEDTAVYYCAASPSLRSAWQWGQGTLVT |
| | | VSS |
| 4A-H58 | 3530 | EVQLVESGGGLVQPGGSLRLSCAASGFTLDYYDMGWFRQAPGKEREFVAAVTWSGGS |
| | | TYYADSVKGRFTISADNSKNTAYLQMNSLKPEDTAVYYCAADRRGLASTRAADYDW |
| | | GQGTLVTVSS |
| 4A-H59 | 3531 | EVQLVESGGGLVQPGGSLRLSCAASGRTFGDYIMGWFRQAPGKEREFVAAINWSAGY |
| | | TPYADSVKGRFTISADNSKNTAYLQMNSLKPEDTAVYYCATAPPLFCWHFDLWGQGT |
| | | LVTVSS |
| 4A-H6 | 3532 | EVQLVESGGGLVQPGGSLRLSCAASGRTFGDDIMGWFRQAPGKEREFVAAIHWSAGY |
| | | TRYADSVKGRFTISADNSKNTAYLQMNSLKPEDTAVYYCATDPPLFWGHVDLWGQGT |
| | | LVTVSS |
| 4A-H61 | 3533 | EVQLVESGGGLVQPGGSLRLSCAASGRTFGDYIMGWFRQAPGKEREIVAAINWSADYT |
| | | PYADSVKGRFTISADNSKNTAYLQMNSLKPEDTAVYYCATAPPNTGWHFDHWGQGTL |
| | | VTVSS |
| 4A-H3 | 3534 | EVQLVESGGGLVQPGGSLRLSCAASGRTFGDYIMGWFRQAPGKEREIVAAINWSAGYT |
| | | AYADSVKGRFTISADNSKNTAYLQMNSLKPEDTAVYYCATATPNTGWHFDHWGQGT |
| | | LVTVSS |
| 4A-H62 | 3535 | EVQLVESGGGLVQPGGSLRLSCAASGRTFSDDTMGWFRQAPGKEREFVAAINWSGGS |
| | | TDYADSVKGRFTISADNSKNTAYLQMNSLKPEDTAVYYCATDPPLFWGQGTLVTVSS |
| 4A-H43 | 3536 | EVQLVESGGGLVQPGGSLRLSCAASGRTFGDDTMGWFRQAPGKEREFVAGINWSGGN |
| | | TYYADSVKGRFTISADNSKNTAYLQMNSLKPEDTAVYYCATDPPLFWGQGTLVTVSS |
| 4A-H5 | 3537 | EVQLVESGGGLVQPGGSLRLSCAASGRTFGDYIMGWFRQAPGKEREFVAAINWTGGY |
| | | TSYADSVKGRFTISADNSKNTAYLQMNSLKPEDTAVYYCATDPPLFWGQGTLVTVSS |
| 4A-H42 | 3538 | EVQLVESGGGLVQPGGSLRLSCAASGRTFGDDTMGWFRQAPGKERECVAAINWSGGN |
| | | TYYADSVKGRFTISADNSKNTAYLQMNSLKPEDTAVYYCATDPPLFWGQGTLVTVSS |
| 4A-H63 | 3539 | EVQLVESGGGLVQPGGSLRLSCAASGRTFSDYTMGWFRQAPGKEREFVAAINWSGGY |
| | | TYYADSVKGRFTISADNSKNTAYLQMNSLKPEDTAVYYCATDPPLFWGQGTLVTVSS |
| 4A-H6 | 3540 | EVQLVESGGGLVQPGGSLRLSCAASGRTFGDYGMGWFRQAPGKEREFVATINWSGAL |
| | | THYADSVKGRFTISADNSKNTAYLQMNSLKPEDTAVYYCATLPFYDFWSGYYTGYYY |
| | | MDVWGQGTLVTVSS |
| 4A-H40 | 3541 | EVQLVESGGGLVQPGGSLRLSCAASGRTFSDDTMGWFRQAPGKEREFLAGVTWSGSS |
| | | TFYADSVKGRFTISADNSKNTAYLQMNSLKPEDTAVYYCATDPPLFWGQGTLVTVSS |
| 4A-H21 | 3542 | EVQLVESGGGLVQPGGSLRLSCAASGRTFSDDIMGWFRQAPGKEREFVAAISWSGGNT |
| | | HYADSVKGRFTISADNSKNTAYLQMNSLKPEDTAVYYCATDPPLFWGQGTLVTVSS |
| 4A-H64 | 3543 | EVQLVESGGGLVQPGGSLRLSCAASGRTFGDYIMGWFRQAPGKERESVAAINWSAGY |
| | | TAYADSVKGRFTISADNSKNTAYLQMNSLKPEDTAVYYCATASPNTGWHFDHWGQG |
| | | TLVTVSS |
| 4A-H47 | 3544 | EVQLVESGGGLVQPGGSLRLSCAASGFTFDDDYVMGWFRQAPGKEREFVAAVSGSGD |
| | | DTYYADSVKGRFTISADNSKNTAYLQMNSLKPEDTAVYYCAADRRGLASTRAADYD |
| | | WGQGTLVTVSS |
| 4A-H65 | 3545 | EVQLVESGGGLVQPGGSLRLSCAASGRTFGDYIMGWFRQAPGKEREFVAAINWSAGY |
| | | TAYADSVKGRFTISADNSKNTAYLQMNSLKPEDTAVYYCATEPPLSCWHFDLWGQGT |
| | | LVTVSS |
| 4A-H18 | 3546 | EVQLVESGGGLVQPGGSLRLSCAASGRTFGDYIMGWFRQAPGKEREIVAAINWSGGYT |
| | | PYADSVKGRFTISADNSKNTAYLQMNSLKPEDTAVYYCATAPPNTGWHFDHWGQGTL |
| | | VTVSS |
| 4A-H66 | 3547 | EVQLVESGGGLVQPGGSLRLSCAASGRTFGDDTMGWFRQAPGKEREIVAAINWSAGY |
| | | TPYADSVKGRFTISADNSKNTAYLQMNSLKPEDTAVYYCATDPPLFCCHFDLWGQGTL |
| | | VTVSS |
| 4A-H36 | 3548 | EVQLVESGGGLVQPGGSLRLSCAASGRTFSDDTMGWFRQAPGKEREFVAAISWSGGTT |
| | | RYADSVKGRFTISADNSKNTAYLQMNSLKPEDTAVYYCATDPPLFWGQGTLVTVSS |
| 4A-H67 | 3549 | EVQLVESGGGLVQPGGSLRLSCAASGRTFSDDTMGWFRQAPGKEREFVAAINWSGDS |
| | | TYYADSVKGRFTISADNSKNTAYLQMNSLKPEDTAVYYCATDPPLFWGQGTLVTVSS |
| 4A-H16 | 3550 | EVQLVESGGGLVQPGGSLRLSCAASGRTFSDDTMGWFRQAPGKEREFVAAINWSGGT |
| | | TRYADSVKGRFTISADNSKNTAYLQMNSLKPEDTAVYYCATDPPLFWGQGTLVTVSS |
| 4A-H11 | 3551 | EVQLVESGGGLVQPGGSLRLSCAASGRTFSDDAMGWFRQAPGKEREFVAAIHWSGSST |
| | | RYADSVKGRFTISADNSKNTAYLQMNSLKPEDTAVYYCATDPPLFWGQGTLVTVSS |
| 4A-H68 | 3552 | EVQLVESGGGLVQPGGSLRLSCAASGRTFSDDTMGWFRQAPGKERELVGTINWSGGST |
| | | YYADSVKGRFTISADNSKNTAYLQMNSLKPEDTAVYYCATDPPLFWGQGTLVTVSS |
| 4A-H34 | 3553 | EVQLVESGGGLVQPGGSLRLSCAASGRTFGDYIMGWFRQAPGKEREFVAAINWSGGY |
| | | TPYADSVKGRFTISADNSKNTAYLQMNSLKPEDTAVYYCATDPPLFWGQGTLVTVSS |
| 4A-H28 | 3554 | EVQLVESGGGLVQPGGSLRLSCAASGRTFGDDTMGWFRQAPGKERELVAAINWNGGN |
| | | THYADSVKGRFTISADNSKNTAYLQMNSLKPEDTAVYYCATDPPLFWGQGTLVTVSS |
| 4A-H69 | 3555 | EVQLVESGGGLVQPGGSLRLSCAASGRTFSDDAMGWFRQAPGKEREFVAAINWSGGT |
| | | TRYADSVKGRFTISADNSKNTAYLQMNSLKPEDTAVYYCATDPPLFWGQGTLVTVSS |
| 4A-H7 | 3556 | EVQLVESGGGLVQPGGSLRLSCAASGRTFGDYIMGWFRQAPGKERESVAAINWSAGY |
| | | TPYADSVKGRFTISADNSKNTAYLQMNSLKPEDTAVYYCATDPPLFWGHVDLWGQGT |
| | | LVTVSS |
| 4A-H71 | 3557 | EVQLVESGGGLVQPGGSLRLSCAASGRTFSDDTMGWFRQAPGKEREWVASINWSGGS |
| | | TYYADSVKGRFTISADNSKNTAYLQMNSLKPEDTAVYYCATDPPLFWGQGTLVTVSS |
| 4A-H23 | 3558 | EVQLVESGGGLVQPGGSLRLSCAASGRTFSDDAMGWFRQAPGKEREFVAGISWNGGSI |
| | | YYADSVKGRFTISADNSKNTAYLQMNSLKPEDTAVYYCATDPPLFWGQGTLVTVSS |
| 4A-H9 | 3559 | EVQLVESGGGLVQPGGSLRLSCAASGFTFDDYEMGWFRQAPGKEREFVAAISWRGGT |
| | | TYYADSVKGRFTISADNSKNTAYLQMNSLKPEDTAVYYCAADRRGLASTRAGDYDW |
| | | GQGTLVTVSS |
| 4A-H72 | 3560 | EVQLVESGGGLVQPGGSLRLSCAASGRTFGDDTMGWFRQAPGKEREFVAAINWSGGY |
| | | TPYADSVKGRFTISADNSKNTAYLQMNSLKPEDTAVYYCATDPPLFWGHVDLWGQGT |
| | | LVTVSS |
| 4A-H73 | 3561 | EVQLVESGGGLVQPGGSLRLSCAASGRTFSDDAMGWFRQAPGKEREFVAAINWSGGS |
| | | TRYADSVKGRFTISADNSKNTAYLQMNSLKPEDTAVYYCATDPPLFWGQGTLVTVSS |
| 4A-H29 | 3562 | EVQLVESGGGLVQPGGSLRLSCAASGVTLDDYAMGWFRQAPGKEREFVAVINWSGGS |
| | | TDYADSVKGRFTISADNSKNTAYLQMNSLKPEDTAVYYCARGGGWVPSSTSESLNWY |
| | | FDRWGQGTLVTVSS |
| 4A-H41 | 3563 | EVQLVESGGGLVQPGGSLRLSCAASGRTFGDYIMGWFRQAPGKERESVAAINWSGGTT |
| | | PYADSVKGRFTISADNSKNTAYLQMNSLKPEDTAVYYCATDPPLFCCHVDLWGQGTL |
| | | VTVSS |
| 4A-H74 | 3564 | EVQLVESGGGLVQPGGSLRLSCAASGLTFSDDTMGWFRQAPGKEREFVAAVSWSGGN |
| | | TYYADSVKGRFTISADNSKNTAYLQMNSLKPEDTAVYYCATDPPLFWGQGTLVTVSS |
| 4A-H75 | 3565 | EVQLVESGGGLVQPGGSLRLSCAASGRTFGDDTMGWFRQAPGKEREFVAAINWTGGY |
| | | TPYADSVKGRFTISADNSKNTAYLQMNSLKPEDTAVYYCATDPPLFWGQGTLVTVSS |
| 4A-H31 | 3566 | EVQLVESGGGLVQPGGSLRLSCAASGRTFGDYIMGWFRQAPGKEREFVATINWTAGY |
| | | TYYADSVKGRFTISADNSKNTAYLQMNSLKPEDTAVYYCATDPPLFCWHFDHWGQGT |
| | | LVTVSS |
| 4A-H32 | 3567 | EVQLVESGGGLVQPGGSLRLSCAASGRTFGDDTMGWFRQAPGKEREFVAAINWSGGN |
| | | TDYADSVKGRFTISADNSKNTAYLQMNSLKPEDTAVYYCATDPPLFWGQGTLVTVSS |
| 4A-H15 | 3568 | EVQLVESGGGLVQPGGSLRLSCAASGRTFGDYTMGWFRQAPGKEREFVAAINWSGGN |
| | | TYYADSVKGRFTISADNSKNTAYLQMNSLKPEDTAVYYCATDPPLFWGQGTLVTVSS |
| 4A-H14 | 3569 | EVQLVESGGGLVQPGGSLRLSCAASGRTFSDDTMGWFRQAPGKEREFVAGINWSGNG |
| | | VYYADSVKGRFTISADNSKNTAYLQMNSLKPEDTAVYYCATDPPLFWGQGTLVTVSS |
| 4A-H76 | 3570 | EVQLVESGGGLVQPGGSLRLSCAASGRTFGDYAMGWFRQAPGKERELVAPINWSGGS |
| | | TYYADSVKGRFTISADNSKNTAYLQMNSLKPEDTAVYYCATDPPLFWGQGTLVTVSS |
| 4A-H50 | 3571 | EVQLVESGGGLVQPGGSLRLSCAASGGTFSNSGMGWFRQAPGKERELVAVVNWSGRR |
| | | TYYADSVKGRFTISADNSKNTAYLQMNSLKPEDTAVYYCAVPWMDYNRRDWGQGTL |
| | | VTVSS |
| 4A-H17 | 3572 | EVQLVESGGGLVQPGGSLRLSCAASGQLANFASYAMGWFRQAPGKEREFVAAITRSGS |
| | | STVYADSVKGRFTISADNSKNTAYLQMNSLKPEDTAVYYCATTMNPNPRWGQGTLVT |
| | | VSS |
| 4A-H37 | 3573 | EVQLVESGGGLVQPGGSLRLSCAASGRTFSDDIMGWFRQAPGKEREFVAAINWTGGST |
| | | YYADSVKGRFTISADNSKNTAYLQMNSLKPEDTAVYYCATDPPLFWGQGTLVTVSS |
| 4A-H44 | 3574 | EVQLVESGGGLVQPGGSLRLSCAASGRTFGDYIMGWFRQAPGKEREIVAAINWSAGYT |
| | | AYADSVKGRFTISADNSKNTAYLQMNSLKPEDTAVYYCATARPNTGWHFDHWGQGT |
| | | LVTVSS |
| 4A-H77 | 3575 | EVQLVESGGGLVQPGGSLRLSCAASGRTFSDDTMGWFRQAPGKEREWVGSINWSGGS |
| | | TYYADSVKGRFTISADNSKNTAYLQMNSLKPEDTAVYYCATDPPLFWGQGTLVTVSS |
| 4A-H78 | 3576 | EVQLVESGGGLVQPGGSLRLSCAASGRTFSDDTMGWFRQAPGKEREFVAGMTWSGSS |
| | | TFYADSVKGRFTISADNSKNTAYLQMNSLKPEDTAVYYCATDPPLFWGQGTLVTVSS |
| 4A-H79 | 3577 | EVQLVESGGGLVQPGGSLRLSCAASGRTFGDYIMGWFRQAPGKERECVAAINWSGDY |
| | | TDYADSVKGRFTISADNSKNTAYLQMNSLKPEDTAVYYCATDPPLFWGQGTLVTVSS |
| 4A-H8 | 3578 | EVQLVESGGGLVQPGGSLRLSCAASGRTFGDYIMGWFRQAPGKEREFVGGINWSGGY |
| | | TYYADSVKGRFTISADNSKNTAYLQMNSLKPEDTAVYYCATDPPLFWGQGTLVTVSS |
| 4A-H81 | 3579 | EVQLVESGGGLVQPGGSLRLSCAASGRTFSDDTMGWFRQAPGKEREFVAAVNWSGGS |
| | | TYYADSVKGRFTISADNSKNTAYLQMNSLKPEDTAVYYCATDPPLFWGQGTLVTVSS |
| 4A-H82 | 3580 | EVQLVESGGGLVQPGGSLRLSCAASGRTFGDYAMGWFRQAPGKEREFVAAINWSGGY |
| | | TRYADSVKGRFTISADNSKNTAYLQMNSLKPEDTAVYYCATDPPLFWGQGTLVTVSS |
| 4A-H83 | 3581 | EVQLVESGGGLVQPGGSLRLSCAASGRTFGDDTMGWFRQAPGKEREFVAAINWSGGY |
| | | TPYADSVKGRFTISADNSKNTAYLQMNSLKPEDTAVYYCATDPPLFWGQGTLVTVSS |
| 4A-H35 | 3582 | EVQLVESGGGLVQPGGSLRLSCAASGRTFGDYIMGWFRQAPGKERESVAAINWSAGY |
| | | TAYADSVKGRFTISADNSKNTAYLQMNSLKPEDTAVYYCARASPNTGWHFDRWGQG |
| | | TLVTVSS |
| 4A-H45 | 3583 | EVQLVESGGGLVQPGGSLRLSCAASGRTFGDYIMGWFRQAPGKEREFVAAINWSGGY |
| | | THYADSVKGRFTISADNSKNTAYLQMNSLKPEDTAVYYCATDPPLFWGQGTLVTVSS |
| 4A-H84 | 3584 | EVQLVESGGGLVQPGGSLRLSCAASGRTFSDDTMGWFRQAPGKEREFVAAITWSGGR |
| | | TRYADSVKGRFTISADNSKNTAYLQMNSLKPEDTAVYYCATDRPLFWGQGTLVTVSS |
| 4A-H85 | 3585 | EVQLVESGGGLVQPGGSLRLSCAASGRTFGDYIMGWFRQAPGKERESVAAINWSGGY |
| | | TAYADSVKGRFTISADNSKNTAYLQMNSLKPEDTAVYYCATASPNTGWHFDHWGQG |
| | | TLVTVSS |
| 4A-H86 | 3586 | EVQLVESGGGLVQPGGSLRLSCAASGRTFSDDTMGWFRQAPGKEREFVAAIHWSGSST |
| | | RYADSVKGRFTISADNSKNTAYLQMNSLKPEDTAVYYCATDPPLFWGQGTLVTVSS |
| 4A-H87 | 3587 | EVQLVESGGGLVQPGGSLRLSCAASGRTFSDYTMGWFRQAPGKEREWVAAINWSGGT |
| | | TYYADSVKGRFTISADNSKNTAYLQMNSLKPEDTAVYYCATDPPLFWGQGTLVTVSS |
| 4A-H88 | 3588 | EVQLVESGGGLVQPGGSLRLSCAASGRTFGDDTMGWFRQAPGKEREFVAAINWSGDN |
| | | THYADSVKGRFTISADNSKNTAYLQMNSLKPEDTAVYYCATDPPLFWGQGTLVTVSS |
| 4A-H89 | 3589 | EVQLVESGGGLVQPGGSLRLSCAASGFAFGDNWIGWFRQAPGKEREWVASISSGGTTA |
| | | YADNVKGRFTIIADNSKNTAYLQMNSLKPEDTAVYYCAHRGGWLRPWGYWGQGTLV |
| | | TVSS |
| 4A-H9 | 3590 | EVQLVESGGGLVQPGGSLRLSCAASGRTFSDDAMGWFRQAPGKEREFVGRINWSGGN |
| | | TYYADSVKGRFTISADNSKNTAYLQMNSLKPEDTAVYYCATDPPLFWGQGTLVTVSS |
| 4A-H91 | 3591 | EVQLVESGGGLVQPGGSLRLSCAASGRTFSDDTMGWFRQAPGKEREFVGGISWSGGN |
| | | TYYADSVKGRFTISADNSKNTAYLQMNSLKPEDTAVYYCATDPPLFWGQGTLVTVSS |
| 4A-H92 | 3592 | EVQLVESGGGLVQPGGSLRLSCAASGRTFSDDTMGWFRQAPGKEREFVAAINWSGGS |
| | | TYYADSVKGRFTISADNSKNTAYLQMNSLKPEDTAVYYCATDPPLFWGQGTLVTVSS |
| 4A-H46 | 3593 | EVQLVESGGGLVQPGGSLRLSCAASGRTFGDDTMGWFRQAPGKEREFVAAINWSGGY |
| | | TYYADSVKGRFTISADNSKNTAYLQMNSLKPEDTAVYYCATDPPLFWGQGTLVTVSS |
| 4A-H20 | 3594 | EVQLVESGGGLVQPGGSLRLSCAASGRTFGDYIMGWFRQAPGKEREFVAAINWSADY |
| | | TAYADSVKGRFTISADNSKNTAYLQMNSLKPEDTAVYYCATDPPLFCWHFDHWGQGT |
| | | LVTVSS |
| 4A-H93 | 3595 | EVQLVESGGGLVQPGGSLRLSCAASGRTFSDDAMGWFRQAPGKEREFVAAINWSGSST |
| | | YYADSVKGRFTISADNSKNTAYLQMNSLKPEDTAVYYCATDPPLFWGQGTLVTVSS |
| 4A-H4 | 3596 | EVQLVESGGGLVQPGGSLRLSCAASGRTFGDYIMGWFRQAPGKEREMVAAINWIAGY |
| | | TADADSVRRLFTITADNNKNTAHLMMNLLKPENTAVYYCAEPSPNTGWHFDHWGQG |
| | | TLVTVSS |
| 4A-H2 | 3597 | EVQLVESGGGLVQPGGSLRLSCAASGRTFGDDTMGWFRQAPGKEREFVAAINWSGGN |
| | | TPYADSVKGRFTISADNSKNTAYLQMNSLKPEDTAVYYCATDPPLFWGQGTLVTVSS |
| 4A-H94 | 3598 | EVQLVESGGGLVQPGGSLRLSCAASGRTFSDDTMGWFRQAPGKEREFVAAINWSGDN |
| | | THYADSVKGRFTISADNSKNTAYLQMNSLKPEDTAVYYCATDPPLFWGQGTLVTVSS |
| 4A-H95 | 3599 | EVQLVESGGGLVQPGGSLRLSCAASGRTFGDYIMGWFRQAPGKEREIVAAINWSAGYT |
| | | AYADSVKGRFTISADNSKNTAYLQMNSLKPEDTAVYYCATAPPLFCWHFDHWGQGTL |
| | | VTVSS |
| 4A-H12 | 3600 | EVQLVESGGGLVQPGGSLRLSCAASGFTFGDYVMGWFRQAPGKEREIVAAINWNAGY |
| | | TAYADSVRGLFTITADNSKNTAYLQMNSLKPEDTAVYYCAKASPNTGWHFDHWGQG |
| | | TLVTVSS |
| 4A-H30 | 3601 | EVQLVESGGGLVQPGGSLRLSCAASGRTFGDYTMGWFRQAPGKEREFVAAINWTGGY |
| | | TYYADSVKGRFTISADNSKNTAYLQMNSLKPEDTAVYYCATDPPLFWGQGTLVTVSS |
| 4A-H27 | 3602 | EVQLVESGGGLVQPGGSLRLSCAASGRTFGDYIMGWFRQAPGKEREIVAAINWSAGYT |
| | | AYADSVKGLFTITADNSKNTAYLQMNILKPEDTAVYYCARATPNTGWHFDHWGQGTL |
| | | VTVSS |
| 4A-H22 | 3603 | EVQLVESGGGLVQPGGSLRLSCAASGRTFGDYIMGWFRQAPGKEREFVAAINWSGDN |
| | | THYADSVKGRFTISADNSKNTAYLQMNSLKPEDTAVYYCATDPPLFWGQGTLVTVSS |
| 4A-H96 | 3604 | EVQLVESGGGLVQPGGSLRLSCAASGRTFGDYIMGWFRQAPGKEREIVAAINWSAGYT |
| | | PYADSVKGRFTISADNSKNTAYLQMNSLKPEDTAVYYCATDPPLFCCHFDHWGQGTL |
| | | VTVSS |
| 4A-H97 | 3605 | EVQLVESGGGLVQPGGSLRLSCAASGRTFGDYIMGWFRQAPGKERESVAAINWSAGY |
| | | TAYADSVKGRFTISADNSKNTAYLQMNSLKPEDTAVYYCATAPPNTGWHFDHWGQG |
| | | TLVTVSS |
| 4A-H98 | 3606 | EVQLVESGGGLVQPGGSLRLSCAASGFTWGDYTMGWFRQAPGKEREFVAAINWSGG |
| | | NTYYADSVKGRFTISADNSKNTAYLQMNSLKPEDTAVYYCAADRRGLASTRAADYD |
| | | WGQGTLVTVSS |
| 4A-H99 | 3607 | EVQLVESGGGLVQPGGSLRLSCAASGIPSTLRAMGWFRQAPGKEREFVAAVSSLGPFT |
| | | RYADSVKGRFTISADNSKNTAYLQMNSLKPEDTAVYYCAAKPGWVARDPSQYNWGQ |
| | | GTLVTVSS |
| 4A-H100 | 3608 | EVQLVESGGGLVQPGGSLRLSCAASGFSFDDDYVMGWFRQAPGKEREFVAAINWSGG |
| | | STYYADSVKGRFTISADNSKNTAYLQMNSLKPEDTAVYYCAADRRGLASTRAADYDW |
| | | GQGTLVTVSS |
| 4A-H101 | 3609 | EVQLVESGGGLVQPGGSLRLSCAASGRTFSNAAMGWFRQAPGKEREFVARILWTGAS |
| | | RSYADSVKGRFTISADNSKNTAYLQMNSLKPEDTAVYYCATTENPNPRWGQGTLVTV |
| | | SS |
| 4A-H102 | 3610 | EVQLVESGGGLVQPGGSLRLSCAASGGTFGVYHMGWFRQAPGKEREGVAAINMSGD |
| | | DSAYADSVKGRFTISADNSKNTAYLQMNSLKPEDTAVYYCAILVGPGQVEFDHWGQG |
| | | TLVTVSS |
| 4A-H103 | 3611 | EVQLVESGGGLVQPGGSLRLSCAASGFTFSSYYMGWFRQAPGKEREFVARI-- |
| | | SGSTFYADSVKGRFTISADNSKNTAYLQMNSLKPEDTAVYYCAALPFVCPSGSYSDYG |
| | | DEYDWGQGTLVTVSS |
| 4A-H104 | 3612 | EVQLVESGGGLVQPGGSLRLSCAASGRTFSGDFMGWFRQAPGKEREFVGRINWSGGN |
| | | TYYADSVRGLFTITADNNKNTAYLMMNLLKPEDTAVYYCPTDPPLFWGLGTLVTWSS |
| 4A-H105 | 3613 | EVQLVESGGGLVQPGGSLRLSCAASGSTLRDYAMGWFRQAPGKERESVAAITWSGGS |
| | | TAYADSVKGRFTISADNSKNTAYLQMNSLKPEDTAVYYCASLLAGDRYFDYWGQGTL |
| | | VTVSS |
| 4A-H106 | 3614 | EVQLVESGGGLVQPGGSLRLSCAASGFTFDDYTMGWFRQAPGKEREFVAAITDNGGS |
| | | KYYADSVKGRFTISADNSKNTAYLQMNSLKPEDTAVYYCAADRRGLASTRAADYDW |
| | | GQGTLVTVSS |
| 4A-H107 | 3615 | EVQLVESGGGLVQPGGSLRLSCAASGGTFSSYGMGWFRQAPGKEREFVAAINWSGAS |
| | | TYYADSVKGRFTISADNSKNTAYLQMNSLKPEDTAVYYCARDWRDRTWGNSLDYWG |
| | | QGTLVTVSS |
| 4A-H108 | 3616 | EVQLVESGGGLVQPGGSLRLSCAASGFSFDDDYVMGWFRQAPGKEREFVAAISWSED |
| | | NTYYADSVKGRFTISADNSKNTAYLQMNSLKPEDTAVYYCAADRRGLASTRAADYD |
| | | WGQGTLVTVSS |
| 4A-H109 | 3617 | EVQLVESGGGLVQPGGSLRLSCAASGFSFDDDYVMGWFRQAPGKEREFVAAVSGSGD |
| | | DTYYADSVKGRFTISADNSKNTAYLQMNSLKPEDTAVYYCAADRRGLASTRAADYD |
| | | WGQGTLVTVSS |
| 4A-H11 | 3618 | EVQLVESGGGLVQPGGSLRLSCAASGNIAAINVMGWFRQAPGKEREFVAAISASGRRT |
| | | DYADSVKGRFTISADNSKNTAYLQMNSLKPEDTAVYYCARRVYYYDSSGPPGVTFDI |
| | | WGQGTLVTVSS |
| 4A-H111 | 3619 | EVQLVESGGGLVQPGGSLRLSCAASGIITSRYVMGWFRQAPGKEREGVAAISTGGSTIY |
| | | ADSVKGRFTISADNSKNTAYLQMNSLKPEDTAVYYCARQDSSSPYFDYWGQGTLVTV |
| | | SS |
| 4A-H112 | 3620 | EVQLVESGGGLVQPGGSLRLSCAASGFSFDDDYVMGWFRQAPGKEREFVAAISNSGLS |
| | | TYYADSVKGRFTISADNSKNTAYLQMNSLKPEDTAVYYCAADRRGLASTRAADYDW |
| | | GQGTLVTVSS |
| 4A-H113 | 3621 | EVQLVESGGGLVQPGGSLRLSCAASGSISSINVMGWFRQAPGKEREFVATMRWSTGST |
| | | YYADSVKGRFTISADNSKNTAYLQMNSLKPEDTAVYYCAQRVRGFFGPLRTTPSWYE |
| | | WGQGTLVTVSS |
| 4A-H114 | 3622 | EVQLVESGGGLVQPGGSLRLSCAASGLTFILYRMGWFRQAPGKEREFVAAINNFGTTK |
| | | YADSVKGRFTISADNSKNTAYLQMNSLKPEDTAVYYCARTHYDFWSGYTSRTPNYFD |
| | | YWGQGTLVTVSS |
| 4A-H115 | 3623 | EVQLVESGGGLVQPGGSLRLSCAASGGTFSVYHMGWFRQAPGKEREPVAAISWSGGS |
| | | TAYADSVKGRFTISADNSKNTAYLQMNSLKPEDTAVYYCAAVNTWTSPSFDSWGQGT |
| | | LVTVSS |
| 4A-H116 | 3624 | EVQLVESGGGLVQPGGSLRLSCAASGRAFSTYGMGWFRQAPGKEREFVAGINWSGDT |
| | | PYYADSVKGRFTISADNSKNTAYLQMNSLKPEDTAVYYCAREVGPPPGYFDLWGQGT |
| | | LVTVSS |
| 4A-H117 | 3625 | EVQLVESGGGLVQPGGSLRLSCAASGRTFSDIAMGWFRQAPGKEREFVASINWGGGNT |
| | | YYADSVKGRFTISADNSKNTAYLQMNSLKPEDTAVYYCAAKGIWDYLGRRDFGDWG |
| | | QGTLVTVSS |
| 4A-H118 | 3626 | EVQLVESGGGLVQPGGSLRLSCAASGRTFSSARMGWFRQAPGKEREFVAAISWSGDNT |
| | | HYADSVKGRFTISADNSKNTAYLQMNSLKPEDTAVYYCATTENPNPRWGQGTLVTVS |
| | | S |
| 4A-H119 | 3627 | EVQLVESGGGLVQPGGSLRLSCAASGFAFSSYAMGWFRQAPGKEREWVATINGDDYT |
| | | YYADSVKGRFTISADNSKNTAYLQMNSLKPEDTAVYYCVATPGGYGLWGQGTLVTVS |
| | | S |
| 4A-H12 | 3628 | EVQLVESGGGLVQPGGSLRLSCAASGITFRRHDMGWFRQAPGKEREFVAAIRWSSSST |
| | | VYADSVKGRFTISADNSKNTAYLQMNSLKPEDTAVYYCAADRGVYGGRWYRTSQYT |
| | | WGQGTLVTVSS |
| 4A-H121 | 3629 | EVQLVESGGGLVQPGGSLRLSCAASGTAASFNPMGWFRQAPGKEREFVAAITSGGSTN |
| | | YADSVKGRFTISADNSKNTAYLQMNSLKPEDTAVYYCAAIAYEEGVYRWDWGQGTL |
| | | VTVSS |
| 4A-H122 | 3630 | EVQLVESGGGLVQPGGSLRLSCAASGNINIINYMGWFRQAPGKEREGVAAIHWNGDST |
| | | AYADSVKGRFTISADNSKNTAYLQMNSLKPEDTAVYYCASGPPYSNYFAYWGQGTLV |
| | | TVSS |
| 4A-H123 | 3631 | EVQLVESGGGLVQPGGSLRLSCAASGFTFDDYAMGWFRQAPGKERESVAAISGSGGST |
| | | AYADSVKGRFTISADNSKNTAYLQMNSLKPEDTAVYYCAKIMGSGRPYFDHWGQGTL |
| | | VTVSS |
| 4A-H124 | 3632 | EVQLVESGGGLVQPGGSLRLSCAASGNIFTRNVMGWFRQAPGKEREFVAAITSSGSTN |
| | | YADSVKGRFTISADNSKNTAYLQMNSLKPEDTAVYYCARPSSDLQGGVDYWGQGTLV |
| | | TVSS |
| 4A-H125 | 3633 | EVQLVESGGGLVQPGGSLRLSCAASGRTFSSIAMGWFRQAPGKEREFVASINWGGGNT |
| | | IYADSVKGRFTISADNSKNTAYLQMNSLKPEDTAVYYCAAKGIWDYLGRRDFGDWGQ |
| | | GTLVTVSS |
| 4A-H126 | 3634 | EVQLVESGGGLVQPGGSLRLSCAASGIPSTLRAMGWFRQAPGKEREFVAAVSSLGPFT |
| | | RYADSVKGRFTISADNSKNTAYLQMNSLKPEDTAVYYCAAKPGWVARDPSEYNWGQ |
| | | GTLVTVSS |
| 4A-H127 | 3635 | EVQLVESGGGLVQPGGSLRLSCAASGFTLDDSAMGWFRQAPGKEREWVAAITNGGST |
| | | YYADSVKGRFTISADNSKNTAYLQMNSLKPEDTAVYYCARFARGSPYFDFWGQGTLV |
| | | TVSS |
| 4A-H128 | 3636 | EVQLVESGGGLVQPGGSLRLSCAASGSISSFNAMGWFRQAPGKERESVAAIDWDGSTA |
| | | YADSVKGRFTISADNSKNTAYLQMNSLKPEDTAVYYCARGGGYYGSGSFEYWGQGTL |
| | | VTVSS |
| 4A-H129 | 3637 | EVQLVESGGGLVQPGGSLRLSCAASGNIFSDNIIGWFRQAPGKEREMVAYYTSGGSIDY |
| | | ADSVKGRFTISADNSKNTAYLQMNSLKPEDTAVYYCARGTAVGRPPPGGMDVWGQG |
| | | TLVTVSS |
| 4A-H13 | 3638 | EVQLVESGGGLVQPGGSLRLSCAASGSISSIGAMGWFRQAPGKEREGVAAISSSGSSTV |
| | | YADSVKGRFTISADNSKNTAYLQMNSLKPEDTAVYYCARVPPGQAYFDSWGQGTLVT |
| | | VSS |
| 4A-H131 | 3639 | EVQLVESGGGLVQPGGSLRLSCAASGFTFDDYGMGWFRQAPGKERELVATITWSGDS |
| | | TYYADSVKGRFTISADNSKNTAYLQMNSLKPEDTAVYYCAKGGSWYYDSSGYYGRW |
| | | GQGTLVTVSS |
| 4A-H132 | 3640 | EVQLVESGGGLVQPGGSLRLSCAASGRTFSNYTMGWFRQAPGKEREWVSAISWSTGST |
| | | YYADSVKGRFTISADNSKNTAYLQMNSLKPEDTAVYYCAADRYGPPWYDWGQGTLV |
| | | TVSS |
| 4A-H134 | 3641 | EVQLVESGGGLVQPGGSLRLSCAASGGTFSSVGMGWFRQAPGKERELVAVINWSGAR |
| | | TYYADSVKGRFTISADNSKNTAYLQMNSLKPEDTAVYYCAVPWMDYNRRDWGQGTL |
| | | VTVSS |
| 4A-H135 | 3642 | EVQLVESGGGLVQPGGSLRLSCAASGRIFTNTAMGWFRQAPGKEREGVAAINWSGGST |
| | | AYADSVKGRFTISADNSKNTAYLQMNSLKPEDTAVYYCARTSGSYSFDYWGQGTLVT |
| | | VSS |
| 4A-H136 | 3643 | EVQLVESGGGLVQPGGSLRLSCAASGEEFSDHWMGWFRQAPGKEREFVGAIHWSGGR |
| | | TYYADSVKGRFTISADNSKNTAYLQMNSLKPEDTAVYYCAADRRGLASTRAADYDW |
| | | GQGTLVTVSS |
| 4A-H137 | 3644 | EVQLVESGGGLVQPGGSLRLSCAASGRTFSSIAMGWFRQAPGKEREFVAAINWSGART |
| | | AYADSVKGRFTISADNSKNTAYLQMNSLKPEDTAVYYCAAKGIWDYLGRRDFGDWG |
| | | QGTLVTVSS |
| 4A-H138 | 3645 | EVQLVESGGGLVQPGGSLRLSCAASGSTSSLRTMGWFRQAPGKEREGVAAISSRDGSTI |
| | | YADSVKGRFTISADNSKNTAYLQMNSLKPEDTAVYYCARDDSSSPYFDYWGQGTLVT |
| | | VSS |
| 4A-H139 | 3646 | EVQLVESGGGLVQPGGSLRLSCAASGGGTFGSYAMGWFRQAPGKEREFVAAISIASGA |
| | | SGGTTNYADSVKGRFTISADNSKNTAYLQMNSLKPEDTAVYYCATTMNPNPRWGQGT |
| | | LVTVSS |
| 4A-H14 | 3647 | EVQLVESGGGLVQPGGSLRLSCAASGRTFSNAAMGWFRQAPGKEREFVARITWNGGS |
| | | TFYADSVKGRFTISADNSKNTAYLQMNSLKPEDTAVYYCATTENPNPRWGQGTLVTV |
| | | SS |
| 4A-H141 | 3648 | EVQLVESGGGLVQPGGSLRLSCAASGIILSDNAMGWFRQAPGKEREFVAAISWLGEST |
| | | YYADSVKGRFTISADNSKNTAYLQMNSLKPEDTAVYYCAADRRGLASTRAADYDWG |
| | | QGTLVTVSS |
| 4A-H142 | 3649 | EVQLVESGGGLVQPGGSLRLSCAASGRTFGDYIMGWFRQAPGKERESVAAINWNGGY |
| | | TAYADSVKGRFTISADNSKNTAYLQMNSLKPEDTAVYYCATTSPNTGWHYYRWGQG |
| | | TLVTVSS |
| 4A-H143 | 3650 | EVQLVESGGGLVQPGGSLRLSCAASGFNFNWYPMGWFRQAPGKERESVAAISWTGVS |
| | | TYTAYADSVKGRFTISADNSKNTAYLQMNSLKPEDTAVYYCARWGPGPAGGSPGLVG |
| | | FDYWGQGTLVTVSS |
| 4A-H144 | 3651 | EVQLVESGGGLVQPGGSLRLSCAASGSIRSVSVMGWFRQAPGKEREAVAAISWSGVGT |
| | | AYADSVKGRFTISADNSKNTAYLQMNSLKPEDTAVYYCAAYQRGWGDWGQGTLVTV |
| | | SS |
| 4A-H145 | 3652 | EVQLVESGGGLVQPGGSLRLSCAASGMTFRLYAMGWFRQAPGKEREFVGAINWLSES |
| | | TYYADSVKGRFTISADNSKNTAYLQMNSLKPEDTAVYYCAAKPGWVARDPSEYNWG |
| | | QGTLVTVSS |
| 4A-H146 | 3653 | EVQLVESGGGLVQPGGSLRLSCAASGRTFSDDAMGWFRQAPGKEREFVAAINWSGGS |
| | | TYYADSVKGRFTISADNSKNTAYLQMNSLKPEDTAVYYCATDPPLFWGQGTMVTVSS |
| 4A-H147 | 3654 | EVQLVESGGGLVQPGGSLRLSCAASGGTFSVYAMGWFRQAPGKEREGVAAISMSGDD |
| | | AAYADSVKGRFTISADNSKNTAYLQMNSLKPEDTAVYYCAKISKDDGGKPRGAFFDS |
| | | WGQGTLVTVSS |
| 4A-H148 | 3655 | EVQLVESGGGLVQPGGSLRLSCAASGFALGYYAMGWFRQAPGKERESVAAISSRDGST |
| | | AYADSVKGRFTISADNSKNTAYLQMNSLKPEDTAVYYCARLATGPQAYFHHWGQGTL |
| | | VTVSS |
| 4A-H149 | 3656 | EVQLVESGGGLVQPGGSLRLSCAASGFNLDDYAMGWFRQAPGKERESVAAISWDGGA |
| | | TAYADSVKGRFTISADNSKNTAYLQMNSLKPEDTAVYYCARVGRGTTAFDSWGQGTL |
| | | VTVSS |
| 4A-H15 | 3657 | EVQLVESGGGLVQPGGSLRLSCAASGNTFSGGFMGWFRQAPGKEREFVASIRSGARTY |
| | | YADSVKGRFTISADNSKNTAYLQMNSLKPEDTAVYYCAQRVRGFFGPLRTTPSWYEW |
| | | GQGTLVTVSS |
| 4A-H151 | 3658 | EVQLVESGGGLVQPGGSLRLSCAASGSIRSINIMGWFRQAPGKEREAVAAISWSGGSTV |
| | | YADSVKGRFTISADNSKNTAYLQMNSLKPEDTAVYYCASLLAGDRYFDYWGQGTLVT |
| | | VSS |
| 7A-1 | 3659 | EVQLVESGGGLVQPGGSLRLSCAASGFTLGDYVMGWFRQAPGKEREFVAAIHSGGST |
| | | YADSVKGRFTISADNSKNTAYLQMNSLKPEDTAVYYCAAKEYGGTRRYDRAYNWGQ |
| | | GTLVTVSS |
| 7A-2 | 3660 | EVQLVESGGGLVQPGGSLRLSCAASGGGTFGSYAMGWFRQAPGKERELVAAISSGGST |
| | | NYADSVKGRFTISADNSKNTAYLQMNSLKPEDTAVYYCARGDWRYGWGQGTLVTVS |
| | | S |
| 7A-3 | 3661 | EVQLVESGGGLVQPGGSLRLSCAASGRTYSISAMGWFRQAPGKEREFVAAISMSGDDS |
| | | AYADSVKGRFTISADNSKNTAYLQMNSLKPEDTAVYYCAAQLGYESGYSLTYDYDW |
| | | GQGTLVTVSS |
| 7A-4 | 3662 | EVQLVESGGGLVQPGGSLRLSCAASGGTFSTYPMGWFRQAPGKEREFVAAITSDGSTL |
| | | YADSVKGRFTISADNSKNTAYLQMNSLKPEDTAVYYCAATDYNKAYAREGRRYDWG |
| | | QGTLVTVSS |
| 7A-5 | 3663 | EVQLVESGGGLVQPGGSLRLSCAASGSIFRINAMGWFRQAPGKEREFVAAIHWSGSSTR |
| | | YADSVKGRFTISADNSKNTAYLQMNSLKPEDTAVYYCAAQDRRRGDYYTFDYHWGQ |
| | | GTLVTVSS |
| 7A-6 | 3664 | EVQLVESGGGLVQPGGSLRLSCAASGGTFNNYAMGWFRQAPGKERELVAAITSGGST |
| | | DYADSVKGRFTISADNSKNTAYLQMNSLKPEDTAVYYCARGDWRYGWGQGTLVTVS |
| | | S |
| 7A-7 | 3665 | EVQLVESGGGLVQPGGSLRLSCAASGTIVNINVMGWFRQAPGKEREFVAAIHWSGGLK |
| | | AYADSVKGRFTISADNSKNTAYLQMNSLKPEDTAVYYCAMNRAGIYEWGQGTLVTVS |
| | | S |
| 7A-8 | 3666 | EVQLVESGGGLVQPGGSLRLSCAASGSTFSNYAMGWFRQAPGKERELVAAITSGGSTS |
| | | YADSVKGRFTISADNSKNTAYLQMNSLKPEDTAVYYCARGDWRYGWGQGTLVTVSS |
| 7A-9 | 3667 | EVQLVESGGGLVQPGGSLRLSCAASGFSFDDYVMGWFRQAPGKEREFVAAISRSGNLK |
| | | SYADSVKGRFTISADNSKNTAYLQMNSLKPEDTAVYYCAAKEYGGTRRYDRAYNWG |
| | | QGTLVTVSS |
| 7A-10 | 3668 | EVQLVESGGGLVQPGGSLRLSCAASGSAFRSTVMGWFRQAPGKEREFVAAVIGSSGIT |
| | | DYADSVKGRFTISADNSKNTAYLQMNSLKPEDTAVYYCARGDWRYGWGQGTLVTVS |
| | | S |
| 7A-11 | 3669 | EVQLVESGGGLVQPGGSLRLSCAASGRTFSDAGMGWFRQAPGKEREFVAAISRSGNLK |
| | | AYADSVKGRFTISADNSKNTAYLQMNSLKPEDTAVYYCAVQVNGTWAWGQGTLVTV |
| | | SS |
| 7A-12 | 3670 | EVQLVESGGGLVQPGGSLRLSCAASGFTLDYYAMGWFRQAPGKERELVAAISWNGGS |
| | | TSYADSVKGRFTISADNSKNTAYLQMNSLKPEDTAVYYCARGDWRYGWGQGTLVTV |
| | | SS |
| 7A-13 | 3671 | EVQLVESGGGLVQPGGSLRLSCAASGGTFSTYVMGWFRQAPGKEREFVAAISWSGEST |
| | | LYADSVKGRFTISADNSKNTAYLQMNSLKPEDTAVYYCAADLMYGVDRRYDWGQGT |
| | | LVTVSS |
| 7A-14 | 3672 | EVQLVESGGGLVQPGGSLRLSCAASGISSSKRNMGWFRQAPGKEREFVAGISWTGGIT |
| | | YYADSVKGRFTISADNSKNTAYLQMNSLKPEDTAVYYCAIAGRGRWGQGTLVTVSS |
| 7A-15 | 3673 | EVQLVESGGGLVQPGGSLRLSCAASGRRFSAYGMGWFRQAPGKEREFVAVISRSGTLT |
| | | RYADSVKGRFTISADNSKNTAYLQMNSLKPEDTAVYYCASSGPADARNGERWHWGQ |
| | | GTLVTVSS |
| 7A-16 | 3674 | EVQLVESGGGLVQPGGSLRLSCAASGLTFSSFVMGWFRQAPGKEREFVAAISSNGGST |
| | | RYADSVKGRFTISADNSKNTAYLQMNSLKPEDTAVYYCAAKEYGGTRRYDRAYNWG |
| | | QGTLVTVSS |
| 7A-17 | 3675 | EVQLVESGGGLVQPGGSLRLSCAASGTVFSISAMGWFRQAPGKEREFVAAISMSGDDT |
| | | AYADSVKGRFTISADNSKNTAYLQMNSLKPEDTAVYYCAAQLGYESGYSLTYDYDW |
| | | GQGTLVTVSS |
| 7A-18 | 3676 | EVQLVESGGGLVQPGGSLRLSCAASGSIFSPNVMGWFRQAPGKEREFVAAITNGGSTK |
| | | YADSVKGRFTISADNSKNTAYLQMNSLKPEDTAVYYCAAQRWRGGSYEWGQGTLVT |
| | | VSS |
| 7A-19 | 3677 | EVQLVESGGGLVQPGGSLRLSCAASGIPASIRVMGWFRQAPGKEREFVAAIHWSGSSTR |
| | | YADSVKGRFTISADNSKNTAYLQMNSLKPEDTAVYYCALSRAIVPGDSEYDYRWGQG |
| | | TLVTVSS |
| 7A-20 | 3678 | EVQLVESGGGLVQPGGSLRLSCAASGRTFSMSAMGWFRQAPGKEREFVSAISWSGGST |
| | | LYADSVKGRFTISADNSKNTAYLQMNSLKPEDTAVYYCAAQLGYESGYSLTYDYDWG |
| | | QGTLVTVSS |
| 7A-21 | 3679 | EVQLVESGGGLVQPGGSLRLSCAASGRTFSNYAMGWFRQAPGKERELVAAITSGGSTD |
| | | YADSVKGRFTISADNSKNTAYLQMNSLKPEDTAVYYCARGDWRYGWGQGTLVTVSS |
| 7A-22 | 3680 | EVQLVESGGGLVQPGGSLRLSCAASGRTFSSYAMGWFRQAPGKERELVAAISTGGSTY |
| | | YADSVKGRFTISADNSKNTAYLQMNSLKPEDTAVYYCARGDWRYGWGQGTLVTVSS |
| 7A-23 | 3681 | EVQLVESGGGLVQPGGSLRLSCAASGRSFSSVGMGWFRQAPGKEREFVAVISRSGAST |
| | | AYADSVKGRFTISADNSKNTAYLQMNSLKPEDTAVYYCASAGPADARNGERWAWGQ |
| | | GTLVTVSS |
| 7A-24 | 3682 | EVQLVESGGGLVQPGGSLRLSCAASGRAFRRYTMGWFRQAPGKERELIAVINWSGDR |
| | | RYYADSVKGRFTISADNSKNTAYLQMNSLKPEDTAVYYCAATLAKGGGRWGQGTLV |
| | | TVSS |
| 7A-25 | 3683 | EVQLVESGGGLVQPGGSLRLSCAAMAWAGFARRRAKNAKWWRALPRGGPTYADSV |
| | | KGRFTISADNSKNTAYLQMNSLKPEDTAVYYCAAGGMWYGSSLYVRFDLLEDGMDW |
| | | GQGTLVTVSS |
| 7A-26 | 3684 | EVQLVESGGGLVQPGGSLRLSCAASGSISSINGMGWFRQAPGKERELVALISRSGGTTY |
| | | YADSVKGRFTISADNSKNTAYLQMNSLKPEDTAVYYCASAGPADARNGERWAWGQG |
| | | TLVTVSS |
| 7A-27 | 3685 | EVQLVESGGGLVQPGGSLRLSCAASGRTFSNNVMGWFRQAPGKERELVAAAISGGSTY |
| | | YADSVKGRFTISADNSKNTAYLQMNSLKPEDTAVYYCARGDWRYGWGQGTLVTVSS |
| 7A-28 | 3686 | EVQLVESGGGLVQPGGSLRLSCAASGRTFSISAMGWFRQAPGKEREFVAAISRSGTTM |
| | | YADSVKGRFTISADNSKNTAYLQMNSLKPEDTAVYYCAAQLGYESGYSLTYDYDWG |
| | | QGTLVTVSS |
| 7A-29 | 3687 | EVQLVESGGGLVQPGGSLRLSCAASGGTFSYYDLAAMGWFRQAPGKEREFVAAISWS |
| | | QYNTKYADSVKGRFTISADNSKNTAYLQMNSLKPEDTAVYYCAARVVVRTAHGFEDN |
| | | WGQGTLVTVSS |
| 7A-30 | 3688 | EVQLVESGGGLVQPGGSLRLSCAASGRTFNNYGMGWFRQAPGKEREFVAVISRSGSLK |
| | | AYADSVKGRFTISADNSKNTAYLQMNSLKPEDTAVYYCASDPTYGSGRWTWGQGTL |
| | | VTVSS |
| 7A-31 | 3689 | EVQLVESGGGLVQPGGSLRLNCAASGFTLDDYVMGWFRQTPGKEREFVAAISSSGALT |
| | | SYADSVKGRFTISADNSKNTAYLQMNSLKPEDAAVYYCAAKEYGGTRRYDRAYNWG |
| | | QGTLVTVSS |
| 7A-32 | 3690 | EVQLVESGGGLVQPGGSLRLSCAASGRTFNAMGWFRQAPGKEREFVAAIRWSGDMSV |
| | | YADSVKGRFTISADNSKNTAYLQMNSLKPEDTAVYYCAAQDRRRGDYYTFDYHWGQ |
| | | GTLVTVSS |
| 7A-33 | 3691 | EVQLVESGGGLVQPGGSLRLSCAASGLTFSTYAMGWFRQAPGKEREFVAAITSGGSTD |
| | | YADSVKGRFTISADNSKNTAYLQMNSLKPEDTAVYYCARGDWRYGWGQGTLVTVSS |
| 7A-34 | 3692 | EVQLVESGGGLVQPGGSLRLSCAASGSIFTINAMGWFRQAPGKEREGVAAIGSDGSTSY |
| | | ADSVKGRFTISADNSKNTAYLQMNSLKPEDTAVYYCAVVRWGADWGQGTLVTVSS |
| 7A-35 | 3693 | EVQLVESGGGLVQPGGSLRLSCAASGLTFSSYAMGWFRQAPGKERELVAAITSSSGSTP |
| | | AYADSVKGRFTISADNSKNTAYLQMNSLKPEDTAVYYCARGDWRYGWGQGTLVTVS |
| | | S |
| 7A-36 | 3694 | EVQLVESGGGLVQPGGSLRLSCAASGIPFSTRTMGWFRQAPGKEREFVAAISWSQYNT |
| | | KYADSVKGRFTISADNSKNTAYLQMNSLKPEDTAVYYCAARHWGMFSRSENDYNWG |
| | | QGTLVTVSS |
| 7A-37 | 3695 | EVQLVESGGGLVQPGGSLRLSCAASGRSRFSTYVMGWFRQAPGKEREFVAAISWSQY |
| | | NTKYADSVKGRFTISADNSKNTAYLQMNSLKPEDTAVYYCAAGNGGRNYGHSRARY |
| | | DWGQGTLVTVSS |
| 7A-38 | 3696 | EVQLVESGGGLVQPGGSLRLSCAASGLTLSSYGMGWFRQAPGKEREYVAVISRSGSLK |
| | | AYADSVKGRFTISADNSKNTAYLQMNSLKPEDTAVYYCATRADAEGWWDWGQGTLV |
| | | TVSS |
| 7A-39 | 3697 | EVQLVESGGGLVQPGGSLRLSCAASGSIFRVNVMGWFRQAPGKEREFVAAINNFGTTK |
| | | YADSVKGRFTISADNSKNTAYLQMNSLKPEDTAVYYCAADLPSRWGQGTLVTVSS |
| 7A-40 | 3698 | EVQLVESGGGLVQPGGSLRLSCAASGRTFRNYAMGWFRQAPGKERELVAAISSGGSTD |
| | | YADSVKGRFTISADNSKNTAYLQMNSLKPEDTAVYYCARGDWRYGWGQGTLVTVSS |
| 7A-41 | 3699 | EVQLVESGGGLVQPGGSLRLSCAASGRTFSSFAMGWFRQAPGKERELVAAISSGGSTN |
| | | YADSVKGRFTISADNSKNTAYLQMNSLKPEDTAVYYCARGDWRYGWGQGTLVTVSS |
| 7A-42 | 3700 | EVQLVESGGGLVQPGGSLRLSCAASGTTFRINAMGWFRQAPGKEREFVAAMNWSGGS |
| | | TKYADSVKGRFTISADNSKNTAYLQMNSLKPEDTAVYYCAAQDRRRGDYYTFDYHW |
| | | GQGTLVTVSS |
| 7A-43 | 3701 | EVQLVESGGGLVQPGGSLRLSCAASGFTLGDYVMGWFRQAPGKEREFVAAIHSGGSTL |
| | | YADSVKGRFTISADNSKNTAYLQMNSLKPEDTAVYYCAAKEYGGTRRYDRTYNWGQ |
| | | GTLVTVSS |
| 7A-44 | 3702 | EVQLVESGGGLVQPGGSLRLSCAASGFTFSRSAMGWFRQAPGKERELVAGILSSGATV |
| | | YADSVKGRFTISADNSKNTAYLQMNSLKPEDTAVYYCAKAPRDWGQGTLVTVSS |
| 7A-45 | 3703 | EVQLVESGGGLVQPGGSLRLSCAASGRTFNNYAMGWFRQAPGKERELVAAITSGGST |
| | | DYADSVKGRFTISADNSKNTAYLQMNSLKPEDTAVYYCARGDWRYGWGQGTLVTVS |
| | | S |
| 7A-46 | 3704 | EVQLVESGGGLVQPGGSLRLSCAASGFTFRSYPMGWFRQAPGKEREFVAAINNFGTTK |
| | | YADSVKGRFTISADNSKNTAYLQMNSLKPEDTAVYYCAAAKGIGVYGWGQGTLVTVS |
| | | S |
| 7A-47 | 3705 | EVQLVESGGGLVQPGGSLRLSCAASGNIFTRNVMGWFRQAPGKEREFVAAIHWNGDS |
| | | TKYADSVKGRFTISADNSKNTAYLQMNSLKPEDTAVYYCAAGSNIGGSRWRYDWGQ |
| | | GTLVTVSS |
| 7A-48 | 3706 | EVQLVESGGGLVQPGGSLRLSCAASGRTISRYTMGWFRQAPGKERELVAAIKWSGAST |
| | | VYADSVKGRFTISADNSKNTAYLQMNSLKPEDTAVYYCAAKGIWDYLGRRDFGDWG |
| | | QGTLVTVSS |
| 7A-49 | 3707 | EVQLVESGGGLVQPGGSLRLSCAASGFRFSSYGMGWFRQAPGKEREFVAIITSGGLTVY |
| | | ADSVKGRFTISADNSKNTAYLQMNSLKPEDTAVYYCAARKTFYFGTSSYPNDYAWGQ |
| | | GTLVTVSS |
| 7A-50 | 3708 | EVQLVESGGGLVQPGGSLRLSCAASGRTFDNHAMGWFRQAPGKEREGVAAIGSDGST |
| | | SYADSVKGRFTISADNSKNTAYLQMNSLKPEDTAVYYCAVVRWGVDWGQGTLVTVS |
| | | S |
| 7A-51 | 3709 | EVQLVESGGGLVQPGGSLRLSCAASGFTFSSHAMGWFRQAPGKEREFVAGISWSGEST |
| | | LTRYADSVKGRFTISADNSKNTAYLQMNSLKPEDTAVYYCADVNGDWGQGTLVTVSS |
| 7A-52 | 3710 | EVQLVESGGGLVQPGGSLRLSCAASGMTFRLYAMGWFRQAPGKEREFVAAISWSQYN |
| | | TKYADSVKGRFTISADNSKNTAYLQMNSLKPEDTAVYYCAAQLGYESGYSLTYDYDW |
| | | GQGTLVTVSS |
| 7A-53 | 3711 | EVQLVESGGGLVQPGGSLRLSCAASGGTFRKLAMGWFRQAPGKEREFVAVISWTGGS |
| | | SYYADSVKGRFTISADNSKNTAYLQMNSLKPEDTAVYYCARLTSFATWGQGTLVTVSS |
| 7A-54 | 3712 | EVQLVESGGGLVQPGGSLRLSCAASGRTFSANGMGWFRQAPGKEREFVAAISASGTLR |
| | | AYADSVKGRFTISADNSKNTAYLQMNSLKPEDTAVYYCAARSPMSPTWDWGQGTLV |
| | | TVSS |
| 7A-55 | 3713 | EVQLVESGGGLVQPGGSLRLSCAASGSAFRSTVMGWFRQAPGKEREFVAAISWTGEST |
| | | LYADSVKGRFTISADNSKNTAYLQMNSLKPEDTAVYYCATGPYRSYFARSYLWGQGT |
| | | LVTVSS |
| 7A-56 | 3714 | EVQLVESGGGLVQPGGSLRLSCAASGGTFDYSGMGWFRQAPGKEREFVAVVSQSGRT |
| | | TYYADSVKGLFTITADNSKNTAYLQMNLLKPEDTAVYYCPTATRPGEWDGGQGTLVT |
| | | VSR |
| 7A-57 | 3715 | EVQLVESGGGLVQPGGSLRLSCAASGVFGPIRAMGWFRQAPGKERELVALMGNDGST |
| | | YADSVKGRFTISADNSKNTAYLQMNSLKPEDTAVYYCAAIGWRWGQGTLVTVSS |
| 7A-58 | 3716 | EVQLVESGGGLVQPGGSLRLSCAASGFNFNWYPMGWFRQAPGKEREFVAAIRWSGGI |
| | | TYYADSVKGRFTISADNSKNTAYLQMNSLKPEDTAVYYCATGPYRSYFARSYLWGQG |
| | | TLVTVSS |
| 7A-59 | 3717 | EVQLVESGGGLVQPGGSLRLSCAASGMTFHRYVMGWFRQAPGKERELVASITTGGTP |
| | | NYADSVKGRFTIITDNNKNTAYLLMINLQPEDTAVYYCCKVPYIWGQGTLGTVGT |
| 7A-60 | 3718 | EVQLVESGGGLVQPGGSLRLSCAASGISTMGWFRQAPGKEREFVAAINNFGTTKYADS |
| | | VKGRFTISADNSKNTAYLQMNSLKPEDTAVYYCAAASQSGSGYDWGQGTLVTVSS |
| 7A-61 | 3719 | EVQLVESGGGLVQPGGSLRLSCAASGRAFNTRAMGWFRQAPGKERELVALMGNDGST |
| | | YADSVKGRFTISADNSKNTAYLQMNSLKPEDTAVYYCAAIGWRWGQGTLVTVSS |
| 7A-62 | 3720 | EVQLVESGGGLVQPGGSLRLSCAASGLTDRRYTMGWFRQAPGKEREFVAAINSGGSTL |
| | | YADSVKGRFTISADNSKNTAYLQMNSLKPEDTAVYYCAAGNGGRTYGHSRARYEWG |
| | | QGTLVTVSS |
| 7A-63 | 3721 | EVQLVESGGGLVQPGGSLRLSCAASGRTFNVMGWFRQAPGKERELVALMGNDGSTY |
| | | ADSVKGRFTISADNSKNTAYLQMNSLKPEDTAVYYCAAVRWGVDWGQGTLVTVSS |
| 7A-64 | 3722 | EVQLVESGGGLVQPGGSLRLSCAASGRAFNTRAMGWFRQAPGKERELVALMGNDGST |
| | | NYADSVKGRFTISADNSKNTAYLQMNSLKPEDTAVYYCAAIGWRWGQGTLVTVSS |
| 7A-65 | 3723 | EVQVVESGGGVVHPGGSVRMRCAASGVTVDYSGMGWFGQAPGKEREFVAVVSQSAR |
| | | TTYYADSVKGRFTISADNSKNTEYLQMNSMKPEDTAVYYCATATRPGEWDWGQGTL |
| | | VTVSS |
| 7A-66 | 3724 | EVQLVESGGGLVQPGGSLRLSCAASGRTPRLGAMGWFRQAPGKEREFVAAISRSGGLT |
| | | SYADSVKGRFTISADNSKNTAYLQMNSLKPEDTAVYYCAAQLVGSNIGGSRWRYDWG |
| | | QGTLVTVSS |
| 7A-67 | 3725 | EVQLVESGGGLVQPGGSLRLSCAASGLTFRNYAMGWFRQAPGKEREFVAAITSGGSTL |
| | | YADSVKGRFTISADNSKNTAYLQMNSLKPEDTAVYYCARGDWRYGWGHGTLVTESS |
| 8A-1 | 3726 | EVQLVESGGGLVQPGGSLRLSCAASGGRTFSDLAMGWFRQAPGKEREFVALITRSGGT |
| | | TFYADSVKGRFTISADNSKNTAYLQMNSLKPEDTAVYYCAIGRGSWGQGTLVTVSS |
| 8A-2 | 3727 | EVQLVESGGGLVQPGGSLRLSCAASGFTFGEYAMGWFRQAPGKEREFVAAVSSLGPFT |
| | | RYADSVKGRFTISADNSKNTAYLQMNSLKPEDTAVYYCAAVLDGYSGSWGQGTLVTV |
| | | SS |
| 8A-3 | 3728 | EVQLVESGGGLVQPGGSLRLSCAASGFAFSSYGMGWFRQAPGKEREFVAAISWSGVRS |
| | | GVSAIYADSVKGRFTISADNSKNTAYLQMNSLKPEDTAVYYCTTDLTGDLWYFDLWG |
| | | QGTLVTVSS |
| 8A-4 | 3729 | EVQLVESGGGLVQPGGSLRLSCAASGLTAGTYAMCWFRQAPGKEREGVACASSTDGS |
| | | TAYADSVKGRFTISADNSKNTAYLQMNSLKPEDTAVYYCAAVRTYGSATYDWGQGT |
| | | LVTVSS |
| 8A-5 | 3730 | EVQLVESGGGLVQPGGSLRLSCAASGFTLDDYVMGWFRQAPGKERELVAAVSSLGPF |
| | | TRYADSVKGRFTISADNSKNTAYLQMNSLKPEDTAVYYCAAKEYGGTRRYDRAYNW |
| | | GQGTLVTVSS |
| 8A-6 | 3731 | EVQLVESGGGLVQPGGSLRLSCAASGPTLGSYVMGWFRQAPGKEREFVAAISWSQYN |
| | | TKYADSVKGRFTISADNSKNTAYLQMNSLKPEDTAVYYCAAQRWRGGSYEWGQGTL |
| | | VTVSS |
| 8A-7 | 3732 | EVQLVESGGGLVQPGGSLRLSCAASGPTFSSYVMGWFRQAPGKEREFVAAISWSQYNT |
| | | KYADSVKGRFTISADNSKNTAYLQMNSLKPEDTAVYYCAAASRSGSGYDWGQGTLVT |
| | | VSS |
| 8A-8 | 3733 | EVQLVESGGGLVQPGGSLRLSCAASGYLYSKDCMGWFRQAPGKEREGVATICTGDGS |
| | | TAYADSVKGRFTISADNSKNTAYLQMNSLKPEDTAVYYCAVIAYEEGVYRWDWGQG |
| | | TLVTVSS |
| 8A-9 | 3734 | EVQLVESGGGLVQPGGSLRLSCAASGFTIDDYAMGWFRQAPGKEREGVAAISGSGDDT |
| | | YYADSVKGRFTISADNSKNTAYLQMNSLKPEDTAVYYCAKLPYVSGDYWGQGTLVT |
| | | VSS |
| 8A-10 | 3735 | EVQLVESGGGLVQPGGSLRLSCAASGGRFSDYGMGWFRQAPGKERELVALISRSGNLK |
| | | SYADSVKGRFTISADNSKNTAYLQMNSLKPEDTAVYYCAAKTGTSFVWGQGTLVTVS |
| | | S |
| 8A-11 | 3736 | EVQLVESGGGLVQPGGSLRLSCAASGLSFSNYAMGWFRQAPGKERELVAAITSGGSTD |
| | | YADSVKGRFTISADNSKNTAYLQMNSLKPEDTAVYYCARGDWRYGWGQGTLVTVSS |
| 8A-12 | 3737 | EVQLVESGGGLVQPGGSLRLSCAASGIPSTLRAMGWFRQAPGKEREFVALINRSGGSQF |
| | | YADSVKGRFTISADNSKNTAYLQMNSLKPEDTAVYYCAIGRGSWGQGTLVTVSS |
| 9A-1 | 3738 | EVQLVESGGGLVQPGGSLRLSCAASGRTFSRLAMGWFRQAPGKEREFVAAISRSGRST |
| | | SYADSVKGRFTISADNSKNTAYLQMNSLKPEDTAVYYCAARRSQILFTSRTDYEWGQG |
| | | TLVTVSS |
| 9A-2 | 3739 | EVQLVESGGGLVQPGGSLRLSCAASGSFSIAAMGWFRQAPGKEREFVATINYSGGGTY |
| | | YADSVKGRFTISADNSKNTAYLQMNSLKPEDTAVYYCAAVNIFDESAYAAFACYDVV |
| | | WGQGTLVTVSS |
| 9A-3 | 3740 | EVQLVESGGGLVQPGGSLRLSCAASGRTFSRYAMGWFRQAPGKEREFVAAISRSGKST |
| | | YYADSVKGRFTISADNSKNTAYLQMNSLKPEDTAVYYCAASSVFSDLRYRKNPKWGQ |
| | | GTLVTVSS |
| 9A-4 | 3741 | EVQLVESGGGLVQPGGSLRLSCAASGRTFSKYAMGWFRQAPGKEREFVSHISRDGGRT |
| | | FSSSTMGWFRQAPGKERELVALITPSSRTTYYADSVKGRFTISADNSKNTAYLQMNSLK |
| | | PEDTAVYYCAIAGRGRWGQGTLVTVSS |
| 9A-5 | 3742 | EVQLVESGGGLVQPGGSLRLSCAASGRTFRRYAMGWFRQAPGKEREFVASINWGGGN |
| | | TYYADSVKGRFTISADNSKNTAYLQMNSLKPEDTAVYYCAKTKRTGIFTTARMVDWG |
| | | QGTLVTVSS |
| 9A-6 | 3743 | EVQLVESGGGLVQPGGSLRLSCAASGRTFSRFAMGWFRQAPGKEREFVAAIRWSGGRT |
| | | VYADSVKGRFTISADNSKNTAYLQMNSLKPEDTAVYYCAIEPGTIRNWRNRVPFARGN |
| | | FGWGQGTLVTVSS |
| 9A-7 | 3744 | EVQLVESGGGLVQPGGSLRLSCAASGLGIAFSRRTAMGWFRQAPGKEREFVAAISWRG |
| | | GNTYYADSVKGRFTISADNSKNTAYLQMNSLKPEDTAVYYCAARRWIPPGPIWGQGT |
| | | LVTVSS |
| 9A-8 | 3745 | EVQLVESGGGLVQPGGSLRLSCAASGRTFRRYPMGWFRQAPGKEREFVAAISRSGGST |
| | | YYADSVKGRFTISADNSKNTAYLQMNSLKPEDTAVYYCAAKRLRSFASGGSYDWGQG |
| | | TLVTVSS |
| 9A-9 | 3746 | EVQLVESGGGLVQPGGSLRLSCAASGGTLRGYGMGWFRQAPGKEREFVASISRSGGST |
| | | YYADSVKGRFTISADNSKNTAYLQMNSLKPEDTAVYYCAARRRVTLFTSRADYDWGQ |
| | | GTLVTVSS |
| 9A-10 | 3747 | EVQLVESGGGLVQPGGSLRLSCAASGRMFSSRSMGWFRQAPGKEREFVALINRSGGSQ |
| | | FYADSVKGRFTISADNSKNTAYLQMNSLKPEDTAVYYCAARRWIPPGPIWGQGTLVTV |
| | | SS |
| 9A-11 | 3748 | EVQLVESGGGLVQPGGSLRLSCAASGRTFGRRAMGWFRQAPGKEREFVAGISRGGGT |
| | | NYADSVKGRFTISADNSKNTAYLQMNSLKPEDTAVYYCAAKGIWDYLGRRDFGDWG |
| | | QGTLVTVSS |
| 10A-1 | 3749 | EVQLVESGGGLVQPGGSLRLSCAASGLSSPPFDDFPMGWFRQAPGKEREFVSSIYSDDG |
| | | DSMYADSVKGRFTISADNSKNTAYLQMNSLKPEDTAVYYCARQTFDFWSASLGGNFW |
| | | YFDLWGQGTLVTVSS |
| 10A-2 | 3750 | EVQLVESGGGLVQPGGSLRLSCAASGGTFSSYSMGWFRQAPGKEREFVSAISWIIGSGG |
| | | TTNYADSVKGRFTISADNSKNTAYLQMNSLKPEDTAVYYCTAGAGDSWGQGTLVTVS |
| | | S |
| 10A-3 | 3751 | EVQLVESGGGLVQPGGSLRLSCAASGSIFSTRTMGWFRQAPGKEREFVASITKFGSTNY |
| | | ADSVKGRFTISADNSKNTAYLQMNSLKPEDTAVYYCTRGGGRFFDWLYLRWGQGTLV |
| | | TVSS |
| 10A-4 | 3752 | EVQLVESGGGLVQPGGSLRLSCAASGRTLWRSNMGWFRQAPGKEREFVASISSFGSTK |
| | | YADSVKGRFTISADNSKNTAYLQMNSLKPEDTAVYYCARGHGRYFDWLLFARPPDYW |
| | | GQGTLVTVSS |
| 10A-5 | 3753 | EVQLVESGGGLVQPGGSLRLSCAASGRSLGIYRMGWFRQAPGKEREFVAAITSGGRKN |
| | | YADSVKGRFTISADNSKNTAYLQMNSLKPEDTAVYYCAKRTIFGVGRWLDPWGQGTL |
| | | VTVSS |
| 10A-6 | 3754 | EVQLVESGGGLVQPGGSLRLSCAASGTTLTFRIMGWFRQAPGKEREFVPAISSTGLASY |
| | | TDSVKGRFTISADNSKNTAYLQMNSLKPEDTAVYYCSKDRAPNCFACCPNGFDVWGQ |
| | | GTLVTVSS |
| 10A-7 | 3755 | EVQLVESGGGLVQPGGSLRLSCAASGSRFSGRFNILNMGWFRQAPGKEREFVARIGYS |
| | | GQSISYADSVKGRFTISADNSKNTAYLQMNSLKPEDTAVYYCARGRFLGGTEWGQGTL |
| | | VTVSS |
| 10A-8 | 3756 | EVQLVESGGGLVQPGGSLRLSCAASGTLFKINAMGWFRQAPGKEREFVAQINRHGVTY |
| | | YADSVKGRFTISADNSKNTAYLQMNSLKPEDTAVYYCARGRTIFFGGGRYFDYWGQG |
| | | TLVTVSS |
| 10A-9 | 3757 | EVQLVESGGGLVQPGGSLRLSCAASGIPFRSRTMGWFRQAPGKEREFVAGITGSGRSQY |
| | | YADSVKGRFTISADNSKNTAYLQMNSLKPEDTAVYYCARGARIFGSVAPWRGGNYYG |
| | | MDVWGQGTLVTVSS |
| 10A-10 | 3758 | EVQLVESGGGLVQPGGSLRLSCAASGFTFSSFRMGWFRQAPGKEREFVAGISRGGSTN |
| | | YADSVKGRFTISADNSKNTAYLQMNSLKPEDTAVYYCARASGLWFRRPHVWGQGTL |
| | | VTVSS |
| 10A-11 | 3759 | EVQLVESGGGLVQPGGSLRLSCAASGRNFRRNSMGWFRQAPGKEREFVAGISWSGAR |
| | | THYADSVKGRFTISADNSKNTAYLQMNSLKPEDTAVYYCARVSRRPRSPPGYYYGMD |
| | | VWGQGTLVTVSS |
| 10A-12 | 3760 | EVQLVESGGGLVQPGGSLRLSCAASGRNLRMYRMGWFRQAPGKEREFVATIRWSDGS |
| | | TYYADSVKGRFTISADNSKNTAYLQMNSLKPEDTAVYYCTRARLRYFDWLFPTNFDY |
| | | WGQGTLVTVSS |
| 10A-13 | 3761 | EVQLVESGGGLVQPGGSLRLSCAASGGLTFSSNTMGWFRQAPGKEREFVASISSSGRTS |
| | | YADSVKGRFTISADNSKNTAYLQMNSLKPEDTAVYYCARRVRRLWFRSYFDLWGQGT |
| | | LVTVSS |
| 10A-14 | 3762 | EVQLVESGGGLVQPGGSLRLSCAASGFTLAYYAMGWFRQAPGKEREFVAAISWSGRNI |
| | | NYADSVKGRFTISADNSKNTAYLQMNSLKPEDTAVYYCARERARWFGKFSVSWGQGT |
| | | LVTVSS |
| 10A-15 | 3763 | EVQLVESGGGLVQPGGSLRLSCAASGRTFSSFPMGWFRQAPGKEREFVAAISWSGSTS |
| | | YADSVKGRFTISADNSKNTAYLQMNSLKPEDTAVYYSACGRLGFGAWGQGTLVTVSS |
| 10A-16 | 3764 | EVQLVESGGGLVQPGGSLRLSCAASGISSSKRNMGWFRQAPGKEREFVATWTSRGITT |
| | | YADSVKGRFTISADNSKNTAYLQMNSLKPEDTAVYYCARGGPPRLWGSYRRKYFDY |
| | | WGQGTLVTVSS |
| 10A-17 | 3765 | EVQLVESGGGLVQPGGSLRLSCAASGRTFSIYAMGWFRQAPGKEREFVARITRGGITKY |
| | | ADSVKGRFTISADNSKNTAYLQMNSLKPEDTAVYYCARGLGWLLGYYWGQGTLVTV |
| | | SS |
| 10A-18 | 3766 | EVQLVESGGGLVQPGGSLRLSCAASGRMYNSYSMGWFRQAPGKEREFVARISPGGTFY |
| | | ADSVKGRFTISADNSKNTAYLQMNSLKPEDTAVYYCTTSARSGWFWRYFDSWGQGTL |
| | | VTVSS |
| 10A-19 | 3767 | EVQLVESGGGLVQPGGSLRLSCAASGRTFRSYGMGWFRQAPGKEREFVASISRSGTTM |
| | | YADSVKGRFTISADNSKNTAYLQMNSLKPEDTAVYYCARRGLLQWFGAPNSWFDPW |
| | | GQGTLVTVSS |
| 10A-20 | 3768 | EVQLVESGGGLVQPGGSLRLSCAASGRTIRTMGWFRQAPGKEREFVATINSRGITNYA |
| | | DSVKGRFTISADNSKNTAYLQMNSLKPEDTAVYYCTTERDGLLWFRELFRPSWGQGTL |
| | | VTVSS |
| 10A-21 | 3769 | EVQLVESGGGLVQPGGSLRLSCAASGRSFSFNAMGWFRQAPGKEREFVARISRFGRTN |
| | | YADSVKGRFTISADNSKNTAYLQMNSLKPEDTAVYYCAKVHSYVWGGHSDYWGQGT |
| | | LVTVSS |
| 10A-22 | 3770 | EVQLVESGGGLVQPGGSLRLSCAASGRTYYAMGWFRQAPGKEREFVGAIDWSGRRIT |
| | | YADSVKGRFTISADNSKNTAYLQMNSLKPEDTAVYYCARVRFSRLGGVIGRPIDSWGQ |
| | | GTLVTVSS |
| 10A-23 | 3771 | EVQLVESGGGLVQPGGSLRLSCAASGRAFRRYTMGWFRQAPGKEREFVASITKFGSTN |
| | | YADSVKGRFTISADNSKNTAYLQMNSLKPEDTAVYYCAKDRGVLWFGELWYWGQGT |
| | | LVTVSS |
| 10A-24 | 3772 | EVQLVESGGGLVQPGGSLRLSCAASGRTFSNYRMGWFRQAPGKEREFVASINRGGSTK |
| | | YADSVKGRFTISADNSKNTAYLQMNSLKPEDTAVYYCASGKGGSATIFHLSRRPLYFD |
| | | YWGQGTLVTVSS |
| 10A-25 | 3773 | EVQLVESGGGLVQPGGSLRLSCAASGITFSPYAMGWFRQAPGKEREFVATINWSGGYT |
| | | VYADSVKGRFTISADNSKNTAYLQMNSLKPEDTAVYYCAKRKNRGPLWFGGGGWGY |
| | | WGQGTLVTVSS |
| 10A-26 | 3774 | EVQLVESGGGLVQPGGSLRLSCAASGRTFSGFTMSSTWMGWFRQAPGKEREFVAGIIT |
| | | NGSTNYADSVKGRFTISADNSKNTAYLQMNSLKPEDTAVYYCARRVAYSSFWSGLRK |
| | | HMDVWGQGTLVTVSS |
| 10A-27 | 3775 | EVQLVESGGGLVQPGGSLRLSCAASGRTFRRYSMGWFRQAPGKEREFVASITPGGNTN |
| | | YADSVKGRFTISADNSKNTAYLQMNSLKPEDTAVYYCASRRRWLTPYIFWGQGTLVT |
| | | VSS |
| 10A-28 | 3776 | EVQLVESGGGLVQPGGSLRLSCAASGSIFSIGMGWFRQAPGKEREFVARIWWRSGATY |
| | | YADSVKGRFTISADNSKNTAYLQMNSLKPEDTAVYYCAAISIFGRLKWGQGTLVTVSS |
| 10A-29 | 3777 | EVQLVESGGGLVQPGGSLRLSCAASGRTFTSYRMGWFRQAPGKEREFVAEISSSGGYT |
| | | YYADSVKGRFTISADNSKNTAYLQMNSLKPEDTAVYYCARVGPLRFLAQRPRLRPDY |
| | | WGQGTLVTVSS |
| 10A-30 | 3778 | EVQLVESGGGLVQPGGSLRLSCAASGRTFSSFRFRAMGWFRQAPGKEREFVALIFSGGS |
| | | TYYADSVKGRFTISADNSKNTAYLQMNSLKPEDTAVYYCAREWGRWLQRGSYWGQG |
| | | TLVTVSS |
| 10A-31 | 3779 | EVQLVESGGGLVQPGGSLRLSCAASGRTFGSYGMGWFRQAPGKEREFVATISIGGRTY |
| | | YADSVKGRFTISADNSKNTAYLQMNSLKPEDTAVYYCARGSGSGFMWYHGNNNYDR |
| | | WRYWGQGTLVTVSS |
| 10A-32 | 3780 | EVQLVESGGGLVQPGGSLRLSCAASGRTFRSYPMGWFRQAPGKEREFVASINRGGSTN |
| | | YADSVKGRFTISADNSKNTAYLQMNSLKPEDTAVYYCARGRYDFWSGYYRWFDPWG |
| | | QGTLVTVSS |
| 10A-33 | 3781 | EVQLVESGGGLVQPGGSLRLSCAASGRTFSRSDMGWFRQAPGKEREFVAAISWSGGST |
| | | SYADSVKGRFTISADNSKNTAYLQMNSLKPEDTAVYYCATVPPPRRFLEWLPRRLTYI |
| | | WGQGTLVTVSS |
| 10A-34 | 3782 | EVQLVESGGGLVQPGGSLRLSCAASGRTFRRYTMGWFRQAPGKEREFVASMRGSRSY |
| | | YADSVKGRFTISADNSKNTAYLQMNSLKPEDTAVYYCARMSGFPFLDYWGQGTLVTV |
| | | SS |
| 10A-35 | 3783 | EVQLVESGGGLVQPGGSLRLSCAASGSIFRLSTMGWFRQAPGKEREFVASISSFGSTYY |
| | | ADSVKGRFTISADNSKNTAYLQMNSLKPEDTAVYYCARTRGIFLWFGESFDYWGQGT |
| | | LVTVSS |
| 10A-36 | 3784 | EVQLVESGGGLVQPGGSLRLSCAASGIAFRIRTMGWFRQAPGKEREFVASITSGGSTNY |
| | | ADSVKGRFTISADNSKNTAYLQMNSLKPEDTAVYYCARGGPRFGGFRGYFDPWGQGT |
| | | LVTVSS |
| 10A-37 | 3785 | EVQLVESGGGLVQPGGSLRLSCAASGFTFTSYRMGWFRQAPGKEREFVAGISRFFGTA |
| | | YYADSVKGRFTISADNSKNTAYLQMNSLKPEDTAVYYCARVTRWFGGLDVWGQGTL |
| | | VTVSS |
| 10A-38 | 3786 | EVQLVESGGGLVQPGGSLRLSCAASGRTFSRYVMGWFRQAPGKEREFVASISRFGRTN |
| | | YADSVKGRFTISADNSKNTAYLQMNSLKPEDTAVYYCARHHGLGILWWGTMDVWGQ |
| | | GTLVTVSS |
| 10A-39 | 3787 | EVQLVESGGGLVQPGGSLRLSCAASGRTFSMGWFRQAPGKEREFVASISRFGRTNYAD |
| | | SVKGRFTISADNSKNTAYLQMNSLKPEDTAVYYCAKRSTWLPQHFDSWGQGTLVTVS |
| | | S |
| 10A-40 | 3788 | EVQLVESGGGLVQPGGSLRLSCAASGRTFSTYTMGWFRQAPGKEREFVARIWRSGGNT |
| | | YYADSVKGRFTISADNSKNTAYLQMNSLKPEDTAVYYCARGVRGVFRAYFDHWGQG |
| | | TLVTVSS |
| 10A-41 | 3789 | EVQLVESGGGLVQPGGSLRLSCAASGRNLRMYRMGWFRQAPGKEREFVALISRVGVT |
| | | SYADSVKGRFTISADNSKNTAYLQMNSLKPEDTAVYYCARGTSFFNFWSGSLGRVGFD |
| | | SWGQGTLVTVSS |
| 10A-42 | 3790 | EVQLVESGGGLVQPGGSLRLSCAASGITIRTHAMGWFRQAPGKEREFVATISRSGGNTY |
| | | YADSVKGRFTISADNSKNTAYLQMNSLKPEDTAVYYCTTAGVLRYFDWFRRPYWGQ |
| | | GTLVTVSS |
| 10A-43 | 3791 | EVQLVESGGGLVQPGGSLRLSCAASGRTFRRYHMGWFRQAPGKEREFVAAITSGGRTN |
| | | YADSVKGRFTISADNSKNTAYLQMNSLKPEDTAVYYCTTDGLRYFDWFPWASAFDIW |
| | | GQGTLVTVSS |
| 10A-44 | 3792 | EVQLVESGGGLVQPGGSLRLSCAASGRTFRRYTMGWFRQAPGKEREFVAVISWSGGST |
| | | KYADSVKGRFTISADNSKNTAYLQMNSLKPEDTAVYYCARKGRWSGMNVWGQGTLV |
| | | TVSS |
| 10A-45 | 3793 | EVQLVESGGGLVQPGGSLRLSCAASGRTFSWYPMGWFRQAPGKEREFVASISWGGAR |
| | | TYYADSVKGRFTISADNSKNTAYLQMNSLKPEDTAVYYCARSTGPRGSGRYRAHWFD |
| | | SWGQGTLVTVSS |
| 10A-46 | 3794 | EVQLVESGGGLVQPGGSLRLSCAASGRTFTSYRMGWFRQAPGKEREFVAAITWNSGRT |
| | | RYADSVKGRFTISADNSKNTAYLQMNSLKPEDTAVYYCSPSSWPFYFGAWGQGTLVT |
| | | VSS |
| 10A-47 | 3795 | EVQLVESGGGLVQPGGSLRLSCAASGRPLRRYVMGWFRQAPGKEREFVAAITNGGST |
| | | KYADSVKGRFTISADNSKNTAYLQMNSLKPEDTAVYYCARGTPWRLLWFGTLGPPPA |
| | | FDYWGQGTLVTVSS |
| 10A-48 | 3796 | EVQLVESGGGLVQPGGSLRLSCAASGRTFRRYAMGWFRQAPGKEREFVAAINRSGSTE |
| | | YADSVKGRFTISADNSKNTAYLQMNSLKPEDTAVYYCARQHQDFWTGYYTVWGQGT |
| | | LVTVSS |
| 10A-49 | 3797 | EVQLVESGGGLVQPGGSLRLSCAASGRTFRRYTMGWFRQAPGKEREFVASISRSGTTY |
| | | YADSVKGRFTISADNSKNTAYLQMNSLKPEDTAVYYCAKEGWRWLQLRGGFDYWGQ |
| | | GTLVTVSS |
| 10A-50 | 3798 | EVQLVESGGGLVQPGGSLRLSCAASGRTLSTYNMGWFRQAPGKEREFVASISRFGRTN |
| | | YADSVKGRFTISADNSKNTAYLQMNSLKPEDTAVYYCARRGKLSAAMHWFDPWGQG |
| | | TLVTVSS |
| 10A-51 | 3799 | EVQLVESGGGLVQPGGSLRLSCAASGRFFSTRVMGWFRQAPGKEREFVARIWPGGSTY |
| | | YADSVKGRFTISADNSKNTAYLQMNSLKPEDTAVYYCARDRGIFGVSRWGQGTLVTV |
| | | SS |
| 10A-52 | 3800 | EVQLVESGGGLVQPGGSLRLSCAASGRFFSICSMGWFRQAPGKEREFVAGINWRSGGS |
| | | TYYADSVKGRFTISADNSKNTAYLQMNSLKPEDTAVYYCARGSGWWEYWGQGTLVT |
| | | VSS |
| 10A-53 | 3801 | EVQLVESGGGLVQPGGSLRLSCAASGRMFSSRSNMGWFRQAPGKEREFVASISSGGTT |
| | | AYADSVKGRFTISADNSKNTAYLQMNSLKPEDTAVYYCARGFGRRFLEWLPRFDYWG |
| | | QGTLVTVSS |
| 10A-54 | 3802 | EVQLVESGGGLVQPGGSLRLSCAASGRTFSSARMGWFRQAPGKEREFVAGINMISSTK |
| | | YADSVKGRFTISADNSKNTAYLQMNSLKPEDTAVYYCAHFRRFLPRGYVDYWGQGTL |
| | | VTVSS |
| 10A-55 | 3803 | EVQLVESGGGLVQPGGSLRLSCAASGRTFRRYTMGWFRQAPGKEREFVARIAGGSTYY |
| | | ADSVKGRFTISADNSKNTAYLQMNSLKPEDTAVYYCARQQYYDFWSGYFRSGYFDLW |
| | | GQGTLVTVSS |
| 10A-56 | 3804 | EVQLVESGGGLVQPGGSLRLSCAASGHTFRNYGMGWFRQAPGKEREFVAAITSSGSTN |
| | | YADSVKGRFTISADNSKNTAYLQMNSLKPEDTAVYYCATVPPPRRFLEWLPRRLTYTW |
| | | GQGTLVTVSS |
| 10A-57 | 3805 | EVQLVESGGGLVQPGGSLRLSCAASGRTFSRYAMGWFRQAPGKEREFVASITKFGSTN |
| | | YADSVKGRFTISADNSKNTAYLQMNSLKPEDTAVYYCAKERESRFLKWRKTDWGQGT |
| | | LVTVSS |
| 10A-58 | 3806 | EVQLVESGGGLVQPGGSLRLSCAASGRNLRMYRMGWFRQAPGKEREFVASISRFGRT |
| | | NYADSVKGRFTISADNSKNTAYLQMNSLKPEDTAVYYCARHDSIGLFRHGMDVWGQ |
| | | GTLVTVSS |
| 10A-59 | 3807 | EVQLVESGGGLVQPGGSLRLSCAASGRTFRRYAMGWFRQAPGKEREFVARISSGGSTS |
| | | YADSVKGRFTISADNSKNTAYLQMNSLKPEDTAVYYCARDRGFGFWSGLRGYFDLWG |
| | | QGTLVTVSS |
| 10A-60 | 3808 | EVQLVESGGGLVQPGGSLRLSCAASGIPASMYLGWFRQAPGKEREFVAAITSGGRTSY |
| | | ADSVKGRFTISADNSKNTAYLQMNSLKPEDTAVYYCAKRKKRGPLWFGGGGWGYWG |
| | | QGTLVTVSS |
| 10A-61 | 3809 | EVQLVESGGGLVQPGGSLRLSCAASGIPFRSRTFSAYAMGWFRQAPGKEREFVAQITRG |
| | | GSTNYADSVKGRFTISADNSKNTAYLQMNSLKPEDTAVYYCARRHWFGFDYWGQGT |
| | | LVTVSS |
| 9-1 | 3810 | QVQLVESGGGVVQPGRSLRLSCAASGFTFSSYAMHWVRQAPGKGLEWVAVISYDGNH |
| | | EYYADSVKGRFTISRDNSKNTLYLQMNSLRAEDTAVYYCARGYKGYYYMDVWGQGT |
| | | LVTVSS |
| 9-2 | 3811 | QVQLVESGGGVVQPGRSLRLSCAASGFSFNNYGMHWVRQAPGKGLEWVAVISFDGSN |
| | | EYYADSVKGRFTISRDNSKNTLYLQMNSLRAEDTAVYYCAKENWLGYFDPWGQGTL |
| | | VTVSS |
| 9-3 | 3812 | QVQLVESGGGVVQPGRSLRLSCAASGFTFGTYAMHWVRQAPGKGLEWVAVVSTEGG |
| | | TTYYADSVKGRFTISRDNSKNTLYLQMNSLRAEDTAVYYCAGSYGAYFDYWGQGTLV |
| | | TVSS |
| 9-4 | 3813 | QVQLVESGGGVVQPGRSLRLSCAASGFDFSDYYMHWVRQAPGKGLEWVAVISYDGS |
| | | NKYYADSVKGRFTISRDNSKNTLYLQMNSLRAEDTAVYYCAREEPVYGMDVWGQGT |
| | | LVTVSS |
| 9-5 | 3814 | QVQLVESGGGVVQPGRSLRLSCAASGFTFGTYAMHWVRQAPGKGLEWVAVVSTEGG |
| | | TTYYADSVKGRFTISRDNSKNTLYLQMNSLRAEDTAVYYCAGSYGAYFDYWGQGTLV |
| | | TVSS |
| 9-6 | 3815 | QVQLVESGGGVVQPGRSLRLSCAASGFTFSGYAMHWVRQAPGKGLEWVAVISYDGSN |
| | | EYYADSVKGRFTISRDNSKNTLYLQMNSLRAEDTAVYYCARTNSGSYYGPFDYWGQG |
| | | TLVTVSS |
| 9-7 | 3816 | QVQLVESGGGVVQPGRSLRLSCAASGFTFSSYAMHWVRQAPGKGLEWVAVISYDGNH |
| | | EYYADSVKGRFTISRDNSKNTLYLQMNSLRAEDTAVYYCARGYKGYYYMDVWGQGT |
| | | LVTVSS |
| 9-8 | 3817 | QVQLVESGGGVVQPGRSLRLSCAASGFTFSSYAMHWVRQAPGKGLEWVAVISYDGNH |
| | | EYYADSVKGRFTISRDNSKNTLYLQMNSLRAEDTAVYYCARGYKGYYYMDVWGQGT |
| | | LVTVSS |
| 9-9 | 3818 | QVQLVESGGGVVQPGRSLRLSCAASGFIFRSYAMHWVRQAPGKGLEWVAVISYDGSS |
| | | KYYADSVKGRFTISRDNSKNTLYLQMNSLRAEDTAVYYCARPSSGSYFPPFDYWGQGT |
| | | LVTVSS |
| 9-10 | 3819 | QVQLVESGGGVVQPGRSLRLSCAASGFTFSDYGMHWVRQAPGKGLEWVAVVSYDGT |
| | | TKYYADSVKGRFTISRDNSKNTLYLQMNSLRAEDTAVYYCAKENWLGYFDPWGQGT |
| | | LVTVSS |
| 9-11 | 3820 | QVQLVESGGGVVQPGRSLRLSCAASGFTFSNFPMHWVRQAPGKGLEWVAVISYDGSL |
| | | KYYADSVKGRFTISRDNSKNTLYLQMNSLRAEDTAVYYCARYQGGYMDVWGQGTLV |
| | | TVSS |
| 9-12 | 3821 | QVQLVESGGGVVQPGRSLRLSCAASGFTFSRFAMHWVRQAPGKGLEWVAVISYDGSN |
| | | KYYADSVKGRFTISRDNSKNTLYLQMNSLRAEDTAVYYCARDTGLGFDPWGQGTLVT |
| | | VSS |
| 9-13 | 3822 | QVQLVESGGGVVQPGRSLRLSCAASGFTFNNYAMHWVRQAPGKGLEWVAVISYDGN |
| | | NKYYADSVKGRFTISRDNSKNTLYLQMNSLRAEDTAVYYCAKTMGGSYFDAFDIWGQ |
| | | GTLVTVSS |
| 9-14 | 3823 | QVQLVESGGGVVQPGRSLRLSCAASGFTFSDYTMHWVRQAPGKGLEWVAVISYEGSI |
| | | KYYADSVKGRFTISRDNSKNTLYLQMNSLRAEDTAVYYCARSSSGSYPSLVDYWGQG |
| | | TLVTVSS |
| 9-15 | 3824 | QVQLVESGGGVVQPGRSLRLSCAASGFSFSSYAMHWVRQAPGKGLEWVAVISFDGSN |
| | | EYYADSVKGRFTISRDNSKNTLYLQMNSLRAEDTAVYYCARDYWVDYFKPGGRGALL |
| | | TTSS |
| 10-1 | 3825 | QVQLVESGGGVVQPGRSLRLSCAASGFTFSRYAMHWVRQAPGKGLEWVAVISYDGTN |
| | | EYYADSVKGRFTISRDNSKNTLYLQMNSLRAEDTAVYYCARDTGLGFDPWGQGTLVT |
| | | VSS |
| 10-2 | 3826 | QVQLVESGGGVVQPGRSLRLSCAASGFTFSRYAMHWVRQAPGKGLEWVAVISYDGTN |
| | | EYYADSVKGRFTISRDNSKNTLYLQMNSLRAEDTAVYYCARDTGLGFDPWGQGTLVT |
| | | VSS |
| 10-3 | 3827 | QVQLVESGGGVVQPGRSLRLSCAASGFTFSRYAMHWVRQAPGKGLEWVAVISYDGTN |
| | | EYYADSVKGRFTISRDNSKNTLYLQMNSLRAEDTAVYYCARDTGLGFDPWGQGTLVT |
| | | VSS |
| 10-4 | 3828 | QVQLVESGGGVVQPGRSLRLSCAASGFTFSRYAMHWVRQAPGKGLEWVAVISYDGTN |
| | | EYYADSVKGRFTISRDNSKNTLYLQMNSLRAEDTAVYYCARDTGLGFDPWGQGTLVT |
| | | VSS |
| 10-5 | 3829 | QVQLVESGGGVVQPGRSLRLSCAASGFTFSRYAMHWVRQAPGKGLEWVAVISYDGTN |
| | | EYYADSVKGRFTISRDNSKNTLYLQMNSLRAEDTAVYYCARDTGLGFDPWGQGTLVT |
| | | VSS |
| 10-6 | 3830 | QVQLVESGGGVVQPGRSLRLSCAASGFTFSRYAMHWVRQAPGKGLEWVAVISYDGTN |
| | | EYYADSVKGRFTISRDNSKNTLYLQMNSLRAEDTAVYYCARDTGLGFDPWGQGTLVT |
| | | VSS |
| 11-1 | 3831 | QVQLVESGGGVVQPGRSLRLSCAASGFTFGSYGMHWVRQAPGKGLEWVAVISYDGG |
| | | DEYYADSVKGRFTISRDNSKNTLYLQMNSLRAEDTAVYYCARDISRYGYYGMDVWG |
| | | QGTLVTVSS |
| 11-2 | 3832 | QVQLVESGGGVVQPGRSLRLSCAASGFTFGTYAMHWVRQAPGKGLEWVAVVSTEGG |
| | | TTYYADSVKGRFTISRDNSKNTLYLQMNSLRAEDTAVYYCAGSYGAYFDYWGQGTLV |
| | | TVSS |
| 11-3 | 3833 | QVQLVESGGGVVQPGRSLRLSCAASGFTFSNFAMHWVRQAPGKGLEWVAVISYDGNH |
| | | EYYADSVKGRFTISRDNSKNTLYLQMNSLRAEDTAVYYCAKTNSGSYGGMFDYWGQ |
| | | GTLVTVSS |
| 11-4 | 3834 | QVQLVESGGGVVQPGRSLRLSCAASGFTFDNYAMHWVRQAPGKGLEWVAVISDDGR |
| | | NKYYADSVKGRFTISRDNSKNTLYLQMNSLRAEDTAVYYCAKDNYYDSSGYYGGGM |
| | | DVWGQGTLVTVSS |
| 11-5 | 3835 | QVQLVESGGGVVQPGRSLRLSCAASGFTFSSFAMHWVRQAPGKGLEWVAVISYDGSN |
| | | KYYADSVKGRFTISRDNSKNTLYLQMNSLRAEDTAVYYCARSRSGSYSSYFDYWGQG |
| | | TLVTVSS |
| 11-6 | 3836 | QVQLVESGGGVVQPGRSLRLSCAASGFTFGTYAMHWVRQAPGKGLEWVAVVSTEGG |
| | | TTYYADSVKGRFTISRDNSKNTLYLQMNSLRAEDTAVYYCAGEYYDSSGSSIDYWGQ |
| | | GTLVTVSS |
| 11-7 | 3837 | QVQLVESGGGVVQPGRSLRLSCAASGFTFSSYAMHWVRQAPGKGLEWVAVISYDGSN |
| | | QYYADSVKGRFTISRDNSKNTLYLQMNSLRAEDTAVYYCARAKGGGYRGAFDIWGQ |
| | | GTLVTVSS |
| 11-8 | 3838 | QVQLVESGGGVVQPGRSLRLSCAASGFTFSSYAMHWVRQAPGKGLEWVAVISYDGSN |
| | | TYYADSVKGRFTISRDNSKNTLYLQMNSLRAEDTAVYYCARPRGGSYWTYFDYWGQ |
| | | GTLVTVSS |
| 11-9 | 3839 | QVQLVESGGGVVQPGRSLRLSCAASGFTFGTYAMHWVRQAPGKGLEWVAVVSTEGG |
| | | TTYYADSVKGRFTISRDNSKNTLYLQMNSLRAEDTAVYYCAGSYGAYFDYWGQGTLV |
| | | TVSS |
| 11-10 | 3840 | QVQLVESGGGVVQPGRSLRLSCAASGFIFNNYGMHWVRQAPGKGLEWVAVISYDGSN |
| | | IYYADSVKGRFTISRDNSKNTLYLQMNSLRAEDTAVYYCARDYNDGIGSYTGAFDSW |
| | | GQGTLVTVSS |
| 11-11 | 3841 | QVQLVESGGGVVQPGRSLRLSCAASGFTFDNYAMHWVRQAPGKGLEWVAVISYDGS |
| | | NKYYADSVKGRFTISRDNSKNTLYLQMNSLRAEDTAVYYCLREGILWDVWGQGTLVT |
| | | VSS |
| 11-12 | 3842 | QVQLVESGGGVVQPGRSLRLSCAASGFTFSSQAMHWVRQAPGKGLEWVAVISYDGSN |
| | | KYYADSVKGRFTISRDNSKNTLYLQMNSLRAEDTAVYYCAKTEGGTYGGAFDIWGQG |
| | | TLVTVSS |
| 11-13 | 3843 | QVQLVESGGGVVQPGRSLRLSCAASGFSFSSYGMHWVRQAPGKGLEWVAVISYDGSD |
| | | KYYADSVKGRFTISRDNSKNTLYLQMNSLRAEDTAVYYCAKDNYYDSSGYYGGGMD |
| | | VWGQGTLVTVSS |
| 11-14 | 3844 | QVQLVESGGGVVQPGRSLRLSCAASGFTFSSYSMHWVRQAPGKGLEWVAVISYDGSH |
| | | KYYADSVKGRFTISRDNSKNTLYLQMNSLRAEDTAVYYCARDGWGYFDYWGQGTLV |
| | | TVSS |
| 11-15 | 3845 | QVQLVESGGGVVQPGRSLRLSCAASGFIFSNYGMHWVRQAPGKGLEWVAVISYDGSD |
| | | KYYADSVKGRFTISRDNSKNTLYLQMNSLRAEDTAVYYCARDDYMYGFEHWGQGTL |
| | | VTVSS |
| 11-16 | 3846 | QVQLVESGGGVVQPGRSLRLSCAASGFTFSDHYMHWVRQAPGKGLEWVAVISYDGSN |
| | | EYYADSVKGRFTISRDNSKNTLYLQMNSLRAEDTAVYYCAKDLGPAGVDYWGQGTL |
| | | VTVSS |
| 11-17 | 3847 | QVQLVESGGGVVQPGRSLRLSCAASGFIFSSYAMHWVRQAPGKGLEWVAVISYDGSN |
| | | KYYADSVKGRFTISRDNSKNTLYLQMNSLRAEDTAVYYCARSRSGSYSSWFDYWGQG |
| | | TLVTVSS |
| 11-18 | 3848 | QVQLVESGGGVVQPGRSLRLSCAASGFTFGTYAMHWVRQAPGKGLEWVAVISYDGN |
| | | NKYYADSVKGRFTISRDNSKNTLYLQMNSLRAEDTAVYYCAKTGSGSYYSWFDYWG |
| | | QGTLVTVSS |
| 11-19 | 3849 | QVQLVESGGGVVQPGRSLRLSCAASGFTFSSYAMHWVRQAPGKGLEWVAVISYDGTN |
| | | DYYADSVKGRFTISRDNSKNTLYLQMNSLRAEDTAVYYCARTRGGSYFTPFDYWGQG |
| | | TLVTVSS |
| 11-20 | 3850 | QVQLVESGGGVVQPGRSLRLSCAASGFTFDDYAMHWVRQAPGKGLEWVAVISYDGS |
| | | NKYYADSVKGRFTISRDNSKNTLYLQMNSLRAEDTAVYYCASPHSGSYWAAFDIWGQ |
| | | GTLVTVSS |
| 12-1 | 3851 | QVQLVESGGGVVQPGRSLRLSCAASGFTFSYYGMHWVRQAPGKGLEWVAVTSYDGS |
| | | NKYYADSVKGRFTISRDNSKNTLYLQMNSLRAEDTAVYYCARPQGGSYFAAFDIWGQ |
| | | GTLVTVSS |
| 12-2 | 3852 | QVQLVESGGGVVQPGRSLRLSCAASGFIFRSYAMHWVRQAPGKGLEWVAVISYDGSS |
| | | KYYADSVKGRFTISRDNSKNTLYLQMNSLRAEDTAVYYCARPSSGSYFPPFDYWGQGT |
| | | LVTVSS |
| 12-3 | 3853 | QVQLVESGGGVVQPGRSLRLSCAASGFTFSSYAMHWVRQAPGKGLEWVAVISYDGSN |
| | | QYYADSVKGRFTISRDNSKNTLYLQMNSLRAEDTAVYYCAKTRTGSYFSAFDIWGQG |
| | | TLVTVSS |
| 12-4 | 3854 | QVQLVESGGGVVQPGRSLRLSCAASGFTFSYYGMHWVRQAPGKGLEWVAVISYDGT |
| | | NDYYADSVKGRFTISRDNSKNTLYLQMNSLRAEDTAVYYCAKPHSGSYRGYFDYWG |
| | | QGTLVTVSS |
| 12-5 | 3855 | QVQLVESGGGVVQPGRSLRLSCAASGFTFSYYGMHWVRQAPGKGLEWVAVTSYDGS |
| | | NKYYSDSVKGRFTISRDNSKNTLYLQMNSLRAEDTAVYYCARPKSGSYATYFDYWGQ |
| | | GTLVTVSS |
| 12-6 | 3856 | QVQLVESGGGVVQPGRSLRLSCAASGFIFRNYAMHWVRQAPGKGLEWVAVISYDGSN |
| | | KYYADSVKGRFTISRDNSKNTLYLQMNSLRAEDTAVYYCARPRGGSYHGAFDIWGQG |
| | | TLVTVSS |
| 12-7 | 3857 | QVQLVESGGGVVQPGRSLRLSCAASGFTFSIYAMHWVRQAPGKGLEWVAVISYDGTN |
| | | EYYADSVKGRFTISRDNSKNTLYLQMNSLRAEDTAVYYCAKSRGGSYYGAFDYWGQ |
| | | GTLVTVSS |
| 12-8 | 3858 | QVQLVESGGGVVQPGRSLRLSCAASGFTFNNYVMHWVRQAPGKGLEWVAVISYDGT |
| | | NDYYADSVKGRFTISRDNSKNTLYLQMNSLRAEDTAVYYCARGESGSYWGAFDYWG |
| | | QGTLVTVSS |
| 12-9 | 3859 | QVQLVESGGGVVQPGRSLRLSCAASGFTFSSYGMHWVRQAPGKGLEWVAVISYDGTT |
| | | EYYADSVKGRFTISRDNSKNTLYLQMNSLRAEDTAVYYCARPSSGSYLGFFDYWGQG |
| | | TLVTVSS |
| 12-10 | 3860 | QVQLVESGGGVVQPGRSLRLSCAASGFIFRSYAMHWVRQAPGKGLEWVAVISYDGSIK |
| | | YYADSVKGRFTISRDNSKNTLYLQMNSLRAEDTAVYYCARTRGGSYYGAFDYWGQG |
| | | TLVTVSS |
| 12-11 | 3861 | QVQLVESGGGVVQPGRSLRLSCAASGFSFGGYGMHWVRQAPGKGLEWVAVISYDGS |
| | | NEYYADSVKGRFTISRDNSKNTLYLQMNSLRAEDTAVYYCAKSYSGSYSSYFDYWGQ |
| | | GTLVTVSS |
| 12-12 | 3862 | QVQLVESGGGVVQPGRSLRLSCAASGFAFSSHAMHWVRQAPGKGLEWVAVISYDGSN |
| | | KYYADSEKGRFTISRDNSKNTLYLQMNSLRAEDTAVYYCAKAYSGSYMGYFDYWGQ |
| | | GTLVTVSS |
| 12-13 | 3863 | QVQLVESGGGVVQPGRSLRLSCAASGFSFSTYGMHWVRQAPGKGLEWVAVISYDGSN |
| | | KYYADSVKGRFTISRDNSKNTLYLQMNSLRAEDTAVYYCARPLSGSYWSWFDPWGQ |
| | | GTLVTVSS |
| 12-14 | 3864 | QVQLVESGGGVVQPGRSLRLSCAASGFTFSSYSMHWVRQAPGKGLEWVAVISYDGSN |
| | | KYYADSVKGRFTISRDNSKNTLYLQMNSLRAEDTAVYYCARGKGGGYYSSFDFWGQ |
| | | GTLVTVSS |
| 12-15 | 3865 | QVQLVESGGGVVQPGRSLRLSCAASGFSFGGYGMHWVRQAPGKGLEWVAVISYDGS |
| | | NKYYADSVKGRFTISRDNSKNTLYLQMNSLRAEDTAVYYCARPYSGSYISWFDYWGQ |
| | | GTLVTVSS |
| 12-16 | 3866 | QVQLVESGGGVVQPGRSLRLSCAASGFIFRSYAMHWVRQAPGKGLEWVAVISYDGSS |
| | | KYYADSVKGRFTISRDNSKNTLYLQMNSLRAEDTAVYYCARTLGGSYFAAFDIWGQG |
| | | TLVTVSS |
| 12-17 | 3867 | QVQLVESGGGVVQPGRSLRLSCAASGFTFGSYGMHWVRQAPGKGLEWVAVISYDGN |
| | | HEYYADSVKGRFTISRDNSKNTLYLQMNSLRAEDTAVYYCARPHSGSYTAYFDYWGQ |
| | | GTLVTVSS |
| 12-18 | 3868 | QVQLVESGGGVVQPGRSLRLSCAASGFTFSSYAMHWVRQAPGKGLEWVAVISYDGSN |
| | | QYYADSVKGRFTISRDNSKNTLYLQMNSLRAEDTAVYYCARGYGGSYSYFDYWGQG |
| | | TLVTVSS |
| 12-19 | 3869 | QVQLVESGGGVVQPGRSLRLSCAASGFAFSSYAMHWVRQAPGKGLEWVAVISYDGTY |
| | | EYYADSVKGRFTISRDNSKNTLYLQMNSLRAEDTAVYYCARSLGGSYFSGMDVWGQG |
| | | TLVTVSS |
| 12-20 | 3870 | QVQLVESGGGVVQPGRSLRLSCAASGFSFGGYGMHWVRQAPGKGLEWVAVISYDGS |
| | | NKYYADSVKGRFTISRDNSKNTLYLQMNSLRAEDTAVYYCARSKGGSYYGPFDYWG |
| | | QGTLVTVSS |
| 12-21 | 3871 | QVQLVESGGGVVQPGRSLRLSCAASGFSFGGYGMHWVRQAPGKGLEWVAVISYDGS |
| | | NKYYADSVKGRFTISRDNSKNTLYLQMNSLRAEDTAVYYCARPKGGNYWNAFDIWG |
| | | QGTLVTVSS |
| 12-22 | 3872 | QVQLVESGGGVVQPGRSLRLSCAASGFTFSSYGMHWVRQAPGKGLEWVAVISYDGNH |
| | | EYYADSVKGRFTISRDNSKNTLYLQMNSLRAEDTAVYYCARPKSGSYVSYFDYWGQG |
| | | TLVTVSS |
| 12-23 | 3873 | QVQLVESGGGVVQPGRSLRLSCAASGFIFSSYAMHWVRQAPGKGLEWVAVISYDGSN |
| | | KYYADSVKGRFTISRDNSKNTLYLQMNSLRAEDTAVYYCARPRGGNYLNYFDYWGQ |
| | | GTLVTVSS |
| 12-24 | 3874 | QVQLVESGGGVVQPGRSLRLSCAASGFTFSNFPMHWVRQAPGKGLEWVAVISYDGNN |
| | | KYYADSVKGRFTISRDNSKNTLYLQMNSLRAEDTAVYYCAKDHGDHYFDYWGQGTL |
| | | VTVSS |
| 12-25 | 3875 | QVQLVESGGGVVQPGRSLRLSCAASGFTFSSYAMHWVRQAPGKGLEWVAVISYDGSN |
| | | QYYADSVKGRFTISRDNSKNTLYLQMNSLRAEDTAVYYCARDKGGSYYGPFDYWGQ |
| | | GTLVTVSS |
| 12-26 | 3876 | QVQLVESGGGVVQPGRSLRLSCAASGFTFSNYAMHWVRQAPGKGLEWVAVISYDGSN |
| | | EYYADSEKGRFTISRDNSKNTLYLQMNSLRAEDTAVYYCAKSGSGSYFSPFDYWGQGT |
| | | LVTVSS |
| 12-27 | 3877 | QVQLVESGGGVVQPGRSLRLSCAASGFSFGGYGMHWVRQAPGKGLEWVAVISYDGST |
| | | KYYADSVKGRFTISRDNSKNTLYLQMNSLRAEDTAVYYCARPRGGSYKDAFDIWGQG |
| | | TLVTVSS |
| 12-28 | 3878 | QVQLVESGGGVVQPGRSLRLSCAASGFTFSSYAMHWVRQAPGKGLEWVAVISYDGTN |
| | | EYYADSEKGRFTISRDNSKNTLYLQMNSLRAEDTAVYYCARAHGGSYFSGMDVWGQ |
| | | GTLVTVSS |
| 12-29 | 3879 | QVQLVESGGGVVQPGRSLRLSCAASGFSFSNYGMHWVRQAPGKGLEWVAVISYDGN |
| | | NKYYADSVKGRFTISRDNSKNTLYLQMNSLRAEDTAVYYCARSKGGSYYGPFDDWG |
| | | QGTLVTVSS |
| 12-30 | 3880 | QVQLVESGGGVVQPGRSLRLSCAASGFTFSGYAMHWVRQAPGKGLEWVAVISYDGSN |
| | | KYYADSVKGRFTISRDNSKNTLYLQMNSLRAEDTAVYYCARSRGGSYYAPFDYWGQG |
| | | TLVTVSS |
| 12-31 | 3881 | QVQLVESGGGVVQPGRSLRLSCAASGFTFSYYTMHWVRQAPGKGLEWVAVTSYDGS |
| | | NKYYADSVKGRFTISRDNSKNTLYLQMNSLRAEDTAVYYCARPLGGSYFAAFDIWGQ |
| | | GTLVTVSS |
| 12-32 | 3882 | QVQLVESGGGVVQPGRSLRLSCAASGFTFGTYAMHWVRQAPGKGLEWVAVISYDGN |
| | | NKYYADSVKGRFTISRDNSKNTLYLQMNSLRAEDTAVYYCAKTMSGSYFSAFDIWGQ |
| | | GTLVTVSS |
| 12-33 | 3883 | QVQLVESGGGVVQPGRSLRLSCAASGFTFSSYAMHWVRQAPGKGLEWVAVISYDGSN |
| | | QYYADSVKGRFTISRDNSKNTLYLQMNSLRAEDTAVYYCARPHGGNYFDWFDPWGQ |
| | | GTLVTVSS |
| 12-34 | 3884 | QVQLVESGGGVVQPGRSLRLSCAASGFIFRSYAMHWVRQAPGKGLEWVAVISYDGSS |
| | | KYYADSVKGRFTISRDNSKNTLYLQMNSLRAEDTAVYYCARPSGGSYFDPFDYWGQG |
| | | TLVTVSS |
| 12-35 | 3885 | QVQLVESGGGVVQPGRSLRLSCAASGFTFSSSSMHWVRQAPGKGLEWVAVISYDGSN |
| | | KYYADSVKGRFTISRDNSKNTLYLQMNSLRAEDTAVYYCAKVDSGSYVGYFDYWGQ |
| | | GTLVTVSS |
| 12-36 | 3886 | QVQLVESGGGVVQPGRSLRLSCAASGFSFNNYGMHWVRQAPGKGLEWVAVISYDGS |
| | | NDYYADSVKGRFTISRDNSKNTLYLQMNSLRAEDTAVYYCARPNSGSYSNYFDYWGQ |
| | | GTLVTVSS |
| 12-37 | 3887 | QVQLVESGGGVVQPGRSLRFSCAGTGFTFSSYAMHWVRQAPGKGLEWVAVISYDGSN |
| | | QYYADSVKGRFTISRDNSKNTLYLQMNSLRAEDTAVYYCARSRSGSYLAYFDYWGQG |
| | | TLVTVSS |
| 12-38 | 3888 | QVQLVESGGGVVQPGRSLRLSCAASGFTFSSYAMHWVRQAPGKGLEWVAVISYDGSN |
| | | QYYADSVKGRFTISRDNSKNTLYLQMNSLRAEDTAVYYCARAAGGSYSSWFDPWGQ |
| | | GTLVTVSS |
| 12-39 | 3889 | QVQLVESGGGVVQPGRSLRLSCAASGFTFSSYAMHWVRQAPGKGLEWVAVISYDGNH |
| | | EYYADSVKGRFTISRDNSKNTLYLQMNSLRAEDTAVYYCARAHSGSYFSHFDYWGQG |
| | | TLVTVSS |
| 12-40 | 3890 | QVQLVESGGGVVQPGRSLRLSCAASGFTFSSYAMHWVRQAPGKGLEWVAVISYDGSN |
| | | TYYADSVKGRFTISRDNSKNTLYLQMNSLRAEDTAVYYCARPTSGSYFSWFDPWGQG |
| | | TLVTVSS |
| 12-41 | 3891 | QVQLVESGGGVVQPGRSLRLSCAASGFIFSSYAMHWVRQAPGKGLEWVAVISYDGSN |
| | | KYYADSVKGRFTISRDNSKNTLYLQMNSLRAEDTAVYYCARPNSGSYWGPFDYWGQ |
| | | GTLVTVSS |
| 12-42 | 3892 | QVQLVESGGGVVQPGRSLRLSCAASGFTFGSYGMHWVRQAPGKGLEWVAVISYDGSH |
| | | KYYADSVKGRFTISRDNSKNTLYLQMNSLRAEDTAVYYCARALGGNYYYFDYWGQG |
| | | TLVTVSS |
| 12-43 | 3893 | QVQLVESGGGVVQPGRSLRLSCAASGFIFSSYGMHWVRQAPGKGLEWVAVISYDGSN |
| | | EYYADSVKGRFTISRDNSKNTLYLQMNSLRAEDTAVYYCARPRSGSYLSAFDYWGQG |
| | | TLVTVSS |
| 13-1 | 3894 | QVQLVESGGGVVQPGRSLRLSCAASGFTFSSYSMHWVRQAPGKGLEWVAVISYDGRN |
| | | QYYADSVKGRFTISRDNSKNTLYLQMNSLRAEDTAVYYCAKGYGGNYYYMDGWGQ |
| | | GTLVTVSS |
| 13-2 | 3895 | QVQLVESGGGVVQPGRSLRLSCAASGFTFSSYAMHWVRQAPGKGLEWVAVISYDGNN |
| | | KYYADSVKGRFTISRDNSKNTLYLQMNSLRAEDTAVYYCARTYGGSYYSAFDYWGQ |
| | | GTLVTVSS |
| 13-3 | 3896 | QVQLVESGGGVVQPGRSLRLSCAASGFSFNNHAMHWVRQAPGKGLEWVAVISYDGS |
| | | DKYYADSVKGRFTISRDNSKNTLYLQMNSLRAEDTAVYYCARNLLRGYGMDVWGQG |
| | | TLVTVSS |
| 13-4 | 3897 | QVQLVESGGGVVQPGRSLRLSCAASGFAFDDYAMHWVRQAPGKGLEWVAVISYDGS |
| | | NKYYADSVKGRFTISRDNSKNTLYLQMNSLRAEDTAVYYCATLGYGDYPDYWGQGT |
| | | LVTVSS |
| 13-5 | 3898 | QVQLVESGGGVVQPGRSLRLSCAASGFIFRSYAMHWVRQAPGKGLEWVAVISYDGSS |
| | | KYYADSVKGRFTISRDNSKNTLYLQMNSLRAEDTAVYYCARPLGGGYQDAFDIWGQG |
| | | TLVTVSS |
| 1N-1 | 3899 | EVQLVESGGGLVQPGGSLRLSCAASGGTFSSIGMGWFRQAPGKEREFVAAISWDGGAT |
| | | AYADSVKGRFTISADNSKNTAYLQMNSLKPEDTAVYYCAKEDVGKPFYWGQGTLVT |
| | | VSS |
| 1N-2 | 3900 | EVQLVESGGGLVQPGGSLRLSCAASGGTFSSIGMGWFRQAPGKEREFVAAISWDGGAT |
| | | AYADSVKGRFTISADNSKNTAYLQMNSLKPEDTAVYYCAKEDVGKPFFWGQGTLVTV |
| | | SS |
| 1N-3 | 3901 | EVQLVESGGGLVQPGGSLRLSCAASGGTFSSIGMGWFRQAPGKEREFVAAISWDGGST |
| | | AYADSVKGRFTISADNSKNTAYLQMNSLKPEDTAVYYCAKEDVGKPFDWGQGTLVT |
| | | VSS |
| 1N-4 | 3902 | EVQLVESGGGLVQPGGSLRLSCAASGGTFSSIGMGWFRQAPGKEREFVAAISWDGGAT |
| | | AYADSVKGRFTISADNSKNTAYLQMNSLKPEDTAVYYCAKEDVGKPFCWGQGTLVTV |
| | | SS |
| 1N-5 | 3903 | EVQLVESGGGLVQPGGSLRLSCAASGGTFSSIGMGWFRQAPGKEREFVAAISWNGGAT |
| | | AYADSVKGRFTISADNSKNTAYLQMNSLKPEDTAVYYCAKEDVGKPFDWGQGTLVT |
| | | VSS |
| 1N-6 | 3904 | EVQLVESGGGLVQPGGSLRLSCAASGGTFSSIGMGWFRQAPGKEREFVAAISWDGGRT |
| | | AYADSVKGRFTISADNSKNTAYLQMNSLKPEDTAVYYCAKEDVGKPFDWGQGTLVT |
| | | VSS |
| 1N-7 | 3905 | EVQLVESGGGLVQPGGSLRLSCAASGGTFSSIGMGWFRQAPGKEREFVAAISWSGGAT |
| | | AYADSVKGRFTISADNSKNTAYLQMNSLKPEDTAVYYCAKEDVGKPFDWGQGTLVT |
| | | VSS |
| 1N-8 | 3906 | EVQLVESGGGLVQPGGSLRLSCAASGGTFSSIGMGWFRQAPGKEREFVAAISWDGGAT |
| | | AYADSVKGRFTISADNSKNTAYLQMNSLKPEDTAVYYCAKEDVGKPLDWGQGTLVT |
| | | VSS |
| 1N-9 | 3907 | EVQLVESGGGLVQPGGSLRLSCAASGGTFSSIGMGWFRQAPGKEREFVAAISWDGGAT |
| | | AYADSVKGRFTISADNSKNTAYLQMNSLKPEDTAVYYCAKEDVGPPFDWGQGTLVTV |
| | | SS |
| 1N-10 | 3908 | EVQLVESGGGLVQPGGSLRLSCAASGGTFSSIGMGWFRQAPGKEREFVAAISWDGGAT |
| | | AYADSVKGRFTISADNSKNTAYLQMNSLKPEDTAVYYCAKEDVGKPFHWGQGTLVT |
| | | VSS |
| 1N-11 | 3909 | EVQLVESGGGLVQPGGSLRLSCAASGGTFSSIGMGWFRQAPGKEREFVAAISWDGGAT |
| | | AYADSVKGRFTISADNSKNTAYLQMNSLKPEDTAVYYCAKEDVGPPFYWGQGTLVTV |
| | | SS |
| 1N-12 | 3910 | EVQLVESGGGLVQPGGSLRLSCAASGGTFSSIGMGWFRQAPGKEREFVAAISWDGGAT |
| | | AYADSVKGRFTISADNSKNTAYLQMNSLKPEDTAVYYCWKEDVGKPGDWGQGTLVT |
| | | VSS |
| 1N-13 | 3911 | EVQLVESGGGLVQPGGSLRLSCAASGGTFSSIGMGWFRQAPGKEREFVAAISWDRGAT |
| | | AYADSVKGRFTISADNSKNTAYLQMNSLKPEDTAVYYCAKEDVGKPFCWGQGTLVTV |
| | | SS |
| 1N-14 | 3912 | EVQLVESGGGLVQPGGSLRLSCAASGGTFSSIGMGWFRQAPGKEREFVAAISWDGGAT |
| | | AYADSVKGRFTISADNSKNTAYLQMNSLKPEDTAVYYCRKEDVGKPFFWGQGTLVTV |
| | | SS |
| 1N-15 | 3913 | EVQLVESGGGLVQPGGSLRLSCAASGGTFSSIGMGWFRQAPGKEREFVAAISWDGGAT |
| | | AYADSVKGRFTISADNSKNTAYLQMNSLKPEDTAVYYCYKEDVGKPFYWGQGTLVT |
| | | VSS |
| 1N-16 | 3914 | EVQLVESGGGLVQPGGSLRLSCAASGGTFSSIGMGWFRQAPGKEREFVAAISWDGGAT |
| | | AYADSVKGRFTISADNSKNTAYLQMNSLKPEDTAVYYCHKEDVGKPFYWGQGTLVT |
| | | VSS |
| 1N-17 | 3915 | EVQLVESGGGLVQPGGSLRLSCAASGGTFSSIGMGWFRQAPGKEREFVAAISWDGGAT |
| | | AYADSVKGRFTISADNSKNTAYLQMNSLKPEDTAVYYCFKEDVGKPFFWGQGTLVTV |
| | | SS |
| 1N-18 | 3916 | EVQLVESGGGLVQPGGSLRLSCAASGGTFSSIGMGWFRQAPGKEREFVAAISWDGGAT |
| | | AYADSVKGRFTISADNSKNTAYLQMNSLKPEDTAVYYCYKEDVGKPFFWGQGTLVTV |
| | | SS |
| 1N-19 | 3917 | EVQLVESGGGLVQPGGSLRLSCAASGGTFSSIGMGWFRQAPGKEREFVAAISWDGGAT |
| | | AYADSVKGRFTISADNSKNTAYLQMNSLKPEDTAVYYCFKEDVGKPFWWGQGTLVT |
| | | VSS |
| 1N-20 | 3918 | EVQLVESGGGLVQPGGSLRLSCAASGGTFSSIGMGWFRQAPGKEREFVAAISWDGGAT |
| | | AYADSVKGRFTISADNSKNTAYLQMNSLKPEDTAVYYCWKEDVGKPFDEGQGTLVTV |
| | | SS |
| 1N-21 | 3919 | EVQLVESGGGLVQPGGSLRLSCAASGFTFSGSWMGWFRQAPGKEREFVATINEYGGR |
| | | NYADSVKGRFTISADNSKNTAYLQMNSLKPEDTAVYYCARVDRDFDYWGQGTLVTV |
| | | SS |
| 1N-22 | 3920 | EVQLVESGGGLVQPGGSLRLSCAASGFWFSPSWMGWFRQAPGKEREFVATINEYGGR |
| | | NYADSVKGRFTISADNSKNTAYLQMNSLKPEDTAVYYCARVDRDFDYWGQGTLVTV |
| | | SS |
| 1N-23 | 3921 | EVQLVESGGGLVQPGGSLRLSCAASGFTFSPSWMGWFRQAPGKEREFVATINEYGGRN |
| | | YADSVKGRFTISADNSKNTAYLQMNSLKPEDTAVYYCARVTRDFDYWGQGTLVTVSS |
| 1N-24 | 3922 | EVQLVESGGGLVQPGGSLRLSCAASGFTFSPSWMGWFRQAPGKEREFVATINEYGGRN |
| | | YADSVKGRFTISADNSKNTAYLQMNSLKPEDTAVYYCARVWRDFDYWGQGTLVTVS |
| | | S |
| 1N-25 | 3923 | EVQLVESGGGLVQPGGSLRLSCAASGFTFSPSWMGWFRQAPGKEREFVATINSYGGRN |
| | | YADSVKGRFTISADNSKNTAYLQMNSLKPEDTAVYYCARVDRDFDYWGQGTLVTVSS |
| 1N-26 | 3924 | EVQLVESGGGLVQPGGSLRLSCAASGFTFSPSWMGWFRQAPGKEREFVAFINEYGGRN |
| | | YADSVKGRFTISADNSKNTAYLQMNSLKPEDTAVYYCARVDRDFDYWGQGTLVTVSS |
| 1N-27 | 3925 | EVQLVESGGGLVQPGGSLRLSCAASGFTFSPSWMGWFRQAPGKEREFVATINPYGGRN |
| | | YADSVKGRFTISADNSKNTAYLQMNSLKPEDTAVYYCARVDRDFDYWGQGTLVTVSS |
| 1N-28 | 3926 | EVQLVESGGGLVQPGGSLRLSCAASGTTFSPSWMGWFRQAPGKEREFVATINEYGGRN |
| | | YADSVKGRFTISADNSKNTAYLQMNSLKPEDTAVYYCARVDRDFDYWGQGTLVTVSS |
| 1N-29 | 3927 | EVQLVESGGGLVQPGGSLRLSCAASGFTFSPSWFGWFRQAPGKEREFVATINEYGGRN |
| | | YADSVKGRFTISADNSKNTAYLQMNSLKPEDTAVYYCARVDRDFDYWGQGTLVTVSS |
| 1N-30 | 3928 | EVQLVESGGGLVQPGGSLRLSCAASGFTFSPSWMGWFRQAPGKEREFVATINEYGGRN |
| | | YADSVKGRFTISADNSKNTAYLQMNSLKPEDTAVYYCARVYRDFDYWGQGTLVTVSS |
| 1N-31 | 3929 | EVQLVESGGGLVQPGGSLRLSCAASGFTFSPSWMGWFRQAPGKEREFVAWINPYGGR |
| | | NYADSVKGRFTISADNSKNTAYLQMNSLKPEDTAVYYCARVDRDFDYWGQGTLVTV |
| | | SS |
| 1N-32 | 3930 | EVQLVESGGGLVQPGGSLRLSCAASGFWFSPSWMGWFRQAPGKEREFVATINEYGGR |
| | | NYADSVKGRFTISADNSKNTAYLQMNSLKPEDTAVYYCARVTRDFDYWGQGTLVTVS |
| | | S |
| 1N-33 | 3931 | EVQLVESGGGLVQPGGSLRLSCAASGFFFYPSWMGWFRQAPGKEREFVATINEYGGRN |
| | | YADSVKGRFTISADNSKNTAYLQMNSLKPEDTAVYYCARVDRDFDYWGQGTLVTVSS |
| 1N-34 | 3932 | EVQLVESGGGLVQPGGSLRLSCAASGFFFHPSWMGWFRQAPGKEREFVATINEYGGRN |
| | | YADSVKGRFTISADNSKNTAYLQMNSLKPEDTAVYYCARVDRDFDYWGQGTLVTVSS |
| 1N-35 | 3933 | EVQLVESGGGLVQPGGSLRLSCAASGFWFSPSWMGWFRQAPGKEREFVATINEYGGR |
| | | NYADSVKGRFTISADNSKNTAYLQMNSLKPEDTAVYYCARVSRDFDYWGQGTLVTVS |
| | | S |
| 1N-36 | 3934 | EVQLVESGGGLVQPGGSLRLSCAASGFWFSPSWMGWFRQAPGKEREFVATINEYGGR |
| | | NYADSVKGRFTISADNSKNTAYLQMNSLKPEDTAVYYCARVDGDFDYWGQGTLVTV |
| | | SS |
| 1N-37 | 3935 | EVQLVESGGGLVQPGGSLRLSCAASGFWFSPSWMGWFRQAPGKEREFVATINNYGGR |
| | | NYADSVKGRFTISADNSKNTAYLQMNSLKPEDTAVYYCARVDRDFDYWGQGTLVTV |
| | | SS |
| 1N-38 | 3936 | EVQLVESGGGLVQPGGSLRLSCAASGFCFSPSWMGWFRQAPGKEREFVATINEYGGRN |
| | | YADSVKGRFTISADNSKNTAYLQMNSLKPEDTAVYYCARVTRDFDYWGQGTLVTVSS |
| 1N-39 | 3937 | EVQLVESGGGLVQPGGSLRLSCAASGWFFSPSWMGWFRQAPGKEREFVATINEYGGR |
| | | NYADSVKGRFTISADNSKNTAYLQMNSLKPEDTAVYYCARVDRDFDYWGQGTLVTV |
| | | SS |
| 1N-40 | 3938 | EVQLVESGGGLVQPGGSLRLSCAASGFWFSPSWMGWFRQAPGKEREFVATINEYGGR |
| | | NYADSVKGRFTISADNSKNTAYLQMNSLKPEDTAVYYCARVYRDFDYWGQGTLVTV |
| | | SS |
| 1N-41 | 3939 | EVQLVESGGGLVQPGGSLRLSCAASGFTFSPSWMGWFRQAPGKEREFVSTINEYGGRN |
| | | YADSVKGRFTISADNSKNTAYLQMNSLKPEDTAVYYCARVTRDFDYWGQGTLVTVSS |
| 1N-42 | 3940 | EVQLVESGGGLVQPGGSLRLSCAASGFTFYPSWMGWFRQAPGKEREFVATINPYGGRN |
| | | YADSVKGRFTISADNSKNTAYLQMNSLKPEDTAVYYCARVDRDFDYWGQGTLVTVSS |
| 1N-43 | 3941 | EVQLVESGGGLVQPGGSLRLSCAASGFWFSPSWMGWFRQAPGKEREFVATINEYGGR |
| | | NYADSVKGRFTISADNSKNTAYLQMNSLKPEDTAVYYCARVDYDFDYWGQGTLVTV |
| | | SS |
| 1N-44 | 3942 | EVQLVESGGGLVQPGGSLRLSCAASGFWFEPSWMGWFRQAPGKEREFVATINEYGGR |
| | | NYADSVKGRFTISADNSKNTAYLQMNSLKPEDTAVYYCARVDRDFDYWGQGTLVTV |
| | | SS |
| 1N-45 | 3943 | EVQLVESGGGLVQPGGSLRLSCAASGFLFSPSWMGWFRQAPGKEREFVATINERGGRN |
| | | YADSVKGRFTISADNSKNTAYLQMNSLKPEDTAVYYCARVDRDFDYWGQGTLVTVSS |
| 1N-46 | 3944 | EVQLVESGGGLVQPGGSLRLSCAASGQTFVMGWFRQAPGKEREFVAAIGSGGSTSYAD |
| | | SVKGRFTISADNSKNTAYLQMNSLKPEDTAVYYCWRLGNDYFDYWGQGTLVTVSS |
| 1N-47 | 3945 | EVQLVESGGGLVQPGGSLRLSCAASGQTFMNIGWFRQAPGKEREFVAAIGSGGSTSYA |
| | | DSVKGRFTISADNSKNTAYLQMNSLKPEDTAVYYCWRLGNDYFDYWGQGTLVTVSS |
| 1N-48 | 3946 | EVQLVESGGGLVQPGGSLRLSCAASGQTFFMGWFRQAPGKEREFVAAIGSGGSTSYAD |
| | | SVKGRFTISADNSKNTAYLQMNSLKPEDTAVYYCWRLGNDYFDYWGQGTLVTVSS |
| 1N-49 | 3947 | EVQLVESGGGLVQPGGSLRLSCAASGQTFLMGWFRQAPGKEREFVAAIGSGGSTSYAD |
| | | SVKGRFTISADNSKNTAYLQMNSLKPEDTAVYYCWRLGNDYFDYWGQGTLVTVSS |
| 1N-50 | 3948 | EVQLVESGGGLVQPGGSLRLSCAASGQTFNMGWFRQAPGKEREFVAAIGSGGSTSYAD |
| | | SVKGRFTISADNSKNTAYLQMNSLKPEDTAVYYCWRYGNDYFDYWGQGTLVTVSS |
| 1N-51 | 3949 | EVQLVESGGGLVQPGGSLRLSCAASGQTFNMGWFRQAPGKEREFVAAIGSGGSTSYAD |
| | | SVKGRFTISADNSKNTAYLQMNSLKPEDTAVYYCWRFGNDYFDYWGQGTLVTVSS |
| 1N-52 | 3950 | EVQLVESGGGLVQPGGSLRLSCAASGQYFNMGWFRQAPGKEREFVAAIGSGGSTSYA |
| | | DSVKGRFTISADNSKNTAYLQMNSLKPEDTAVYYCWRLGNDYFDYWGQGTLVTVSS |
| 1N-53 | 3951 | EVQLVESGGGLVQPGGSLRLSCAASGQTFNMGWFRQAPGKEREFVADIGSGGSTSYAD |
| | | SVKGRFTISADNSKNTAYLQMNSLKPEDTAVYYCWRLGNDYFDYWGQGTLVTVSS |
| 1N-54 | 3952 | EVQLVESGGGLVQPGGSLRLSCAASGQTYNMGWFRQAPGKEREFVAAIGSGGSTSYA |
| | | DSVKGRFTISADNSKNTAYLQMNSLKPEDTAVYYCWRLGNDYFDYWGQGTLVTVSS |
| 1N-55 | 3953 | EVQLVESGGGLVQPGGSLRLSCAASGQFFNMGWFRQAPGKEREFVAAIGSGGSTSYAD |
| | | SVKGRFTISADNSKNTAYLQMNSLKPEDTAVYYCWRLGNDYFDYWGQGTLVTVSS |
| 1N-56 | 3954 | EVQLVESGGGLVQPGGSLRLSCAASGQTFIMGWFRQAPGKEREFVAAGGSGGSTSYAD |
| | | SVKGRFTISADNSKNTAYLQMNSLKPEDTAVYYCWRLGNDYFDYWGQGTLVTVSS |
| 1N-57 | 3955 | EVQLVESGGGLVQPGGSLRLSCAASGQTQPMGWFRQAPGKEREFVAAIGSGGSTSYAD |
| | | SVKGRFTISADNSKNTAYLQMNSLKPEDTAVYYCWRLGNDYFDYWGQGTLVTVSS |
| 1N-58 | 3956 | EVQLVESGGGLVQPGGSLRLSCAASGQTFIMGWFRQAPGKEREFVAAIGSGGSTSYAD |
| | | SVKGRFTISADNSKNTAYLQMNSLKPEDTAVYYCWREGNDYFDYWGQGTLVTVSS |
| 1N-59 | 3957 | EVQLVESGGGLVQPGGSLRLSCAASGQTFTMGWFRQAPGKEREFVAAIGSGGSTSYAD |
| | | SVKGRFTISADNSKNTAYLQMNSLKPEDTAVYYCWREGNDYFDYWGQGTLVTVSS |
| 1N-60 | 3958 | EVQLVESGGGLVQPGGSLRLSCAASGQTFTMGWFRQAPGKEREFVAAIGSGGWTSYA |
| | | DSVKGRFTISADNSKNTAYLQMNSLKPEDTAVYYCWRLGNDYFDYWGQGTLVTVSS |
| 1N-61 | 3959 | EVQLVESGGGLVQPGGSLRLSCAASGQTFTMGWFRQAPGKEREFVAAIGSGGSTSYAD |
| | | SVKGRFTISADNSKNTAYLQMNSLKPEDTAVYYCWRGGNDYFDYWGQGTLVTVSS |
| 1N-62 | 3960 | EVQLVESGGGLVQPGGSLRLSCAASGQTFTMGWFRQAPGKEREFVAAGGSGGSTSYA |
| | | DSVKGRFTISADNSKNTAYLQMNSLKPEDTAVYYCWRLGNDYFDYWGQGTLVTVSS |
| 1N-63 | 3961 | EVQLVESGGGLVQPGGSLRLSCAASGQTFFFGWFRQAPGKEREFVAAIGSGGSTSYAD |
| | | SVKGRFTISADNSKNTAYLQMNSLKPEDTAVYYCWRLGNDYFDYWGQGTLVTVSS |
| 1N-64 | 3962 | EVQLVESGGGLVQPGGSLRLSCAASGQTFTMGWFRQAPGKEREFVAPIGSGGSTSYAD |
| | | SVKGRFTISADNSKNTAYLQMNSLKPEDTAVYYCWRLGNDYFDYWGQGTLVTVSS |
| 1N-65 | 3963 | EVQLVESGGGLVQPGGSLRLSCAASGQTFMNIGWFRQAPGKEREFVAAIGSGGSTSYA |
| | | DSVKGRFTISADNSKNTAYLQMNSLKPEDTAVYYCWRYGNDYFDYWGQGTLVTVSS |
| 1N-66 | 3964 | EVQLVESGGGLVQPGGSLRLSCAASGQTFVMGWFRQAPGKEREFVAAIGSGGSTSYAD |
| | | SVKGRFTISADNSKNTAYLQMNSLKPEDTAVYYCWRYGNDYFDYWGQGTLVTVSS |
| 1N-67 | 3965 | EVQLVESGGGLVQPGGSLRLSCAASGQTFMNIGWFRQAPGKEREFVGAIGSGGSTSYA |
| | | DSVKGRFTISADNSKNTAYLQMNSLKPEDTAVYYCWRLGNDYFDYWGQGTLVTVSS |
| 1N-68 | 3966 | EVQLVESGGGLVQPGGSLRLSCAASGQTFTMGWFRQAPGKEREFVAAIGSGGSTSYAD |
| | | SVKGRFTISADNSKNTAYLQMNSLKPEDTAVYYCWRLTNDYFDYWGQGTLVTVSS |
| 1N-69 | 3967 | EVQLVESGGGLVQPGGSLRLSCAASGQTFFVGWFRQAPGKEREFVAAIGSGGSTSYAD |
| | | SVKGRFTISADNSKNTAYLQMNSLKPEDTAVYYCWRLGNDYFDYWGQGTLVTVSS |
| 1N-70 | 3968 | EVQLVESGGGLVQPGGSLRLSCAASGQTFVFGWFRQAPGKEREFVAAIGSGGSTSYAD |
| | | SVKGRFTISADNSKNTAYLQMNSLKPEDTAVYYCWRLGNDYFDYWGQGTLVTVSS |
| 1N-71 | 3969 | EVQLVESGGGLVQPGGSLRLSCAASGQTFIMGWFRQAPGKEREFVAAGGSGGSPSYAD |
| | | SVKGRFTISADNSKNTAYLQMNSLKPEDTAVYYCWRYGNDYFDYWGQGTLVTVSS |
| 1N-72 | 3970 | EVQLVESGGGLVQPGGSLRLSCAASGQTFIMGWFRQAPGKEREFVAAGGSGGSTSYAD |
| | | SVKGRFTISADNSKNTAYLQMNSLKPEDTAVYYCWRYGNDYFDYWGQGTLVTVSS |
| 1N-73 | 3971 | EVQLVESGGGLVQPGGSLRLSCAASGQTFIMGWFRQAPGKEREFVAAGGSGGSPSYAD |
| | | SVKGRFTISADNSKNTAYLQMNSLKPEDTAVYYCWRLGNDYFDYWGQGTLVTVSS |
| 1N-74 | 3972 | EVQLVESGGGLVQPGGSLRLSCAASGQTFIMGWFRQAPGKEREFVGAGGSGGSTSYAD |
| | | SVKGRFTISADNSKNTAYLQMNSLKPEDTAVYYCWRLGNDYFDYWGQGTLVTVSS |
| 1N-75 | 3973 | EVQLVESGGGLVQPGGSLRLSCAASGQTQPMGWFRQAPGKEREFVAAIGSGGSTSYAD |
| | | SVKGRFTISADNSKNTAYLQMNSLKPEDTAVYYCWRYGNDYFDYWGQGTLVTVSS |
| 1N-76 | 3974 | EVQLVESGGGLVQPGGSLRLSCAASGQTFIMGWFRQAPGKEREFVAAGGSGGSTSPAD |
| | | SVKGRFTISADNSKNTAYLQMNSLKPEDTAVYYCWRLGNDYFDYWGQGTLVTVSS |
| 1N-77 | 3975 | EVQLVESGGGLVQPGGSLRLSCAASGQTFIMGWFRQAPGKEREFVAAGGSGGSTSYAD |
| | | SVKGRFTISADNSKNTAYLQMNSLKPEDTAVYYCWRFGNDYFDYWGQGTLVTVSS |
| 1N-78 | 3976 | EVQLVESGGGLVQPGGSLRLSCAASGQTFIMGWFRQAPGKEREFVAAGGSGGSTSYAD |
| | | SVKGRFTISADNSKNTAYLQMNSLKPEDTAVYYCPRLGNDYFDYWGQGTLVTVSS |
| 1N-79 | 3977 | EVQLVESGGGLVQPGGSLRLSCAASGQTFIMGWFRQAPGKEREFVAAGGSGGSTSYAD |
| | | SVKGRFTISADNSKNTAYLQMNSLKPEDTAVYYCWRTGNDYFDYWGQGTLVTVSS |
| 1N-80 | 3978 | EVQLVESGGGLVQPGGSLRLSCAASGQTQPMGWFRQAPGKEREFVAAIGSGGSTSYAD |
| | | SVKGRFTISADNSKNTAYLQMNSLKPEDTAVYYCWRHGNDYFDYWGQGTLVTVSS |
| 1N-81 | 3979 | EVQLVESGGGLVQPGGSLRLSCAASGSIFRSNAMGWFRQAPGKEREWVATIGSDGTTI |
| | | YADSVKGRFTISADNSKNTAYLQMNSLKPEDTAVYYCAGDYDFWSGFDHWGQGTLV |
| | | TVSS |
| 1N-82 | 3980 | EVQLVESGGGLVQPGGSLRLSCAASGFDFSVSWMGWFRQAPGKEREFVASTNSAGST |
| | | YADSVKGRFTISADNSKNTAYLQMNSLKPEDTAVYYCARHYYDSSDYYPHYYYYGM |
| | | DVWGQGTLVTVSS |
| 1N-83 | 3981 | EVQLVESGGGLVQPGGSLRLSCAASGYTYSSNWMGWFRQAPGKEREFVSAIDSEGRTS |
| | | YADSVKGRFTISADNSKNTAYLQMNSLKPEDTAVYYCARHMGYYDSGTYFDYFDYW |
| | | GQGTLVTVSS |
| 1N-84 | 3982 | EVQLVESGGGLVQPGGSLRLSCAASGGTFSFYGMGWFRQAPGKEREFVATISWSGGD |
| | | GRSYYADSVKGRFTISADNSKNTAYLQMNSLKPEDTAVYYCTTVDQYFDYWGQGTLV |
| | | TVSS |
| 1N-85 | 3983 | EVQLVESGGGLVQPGGSLRLSCAASGSIFRSNAMGWFRQAPGKEREWVATIGSDGTTI |
| | | YADSVKGRFTISADNSKNTAYLQMNSLKPEDTAVYYCARYDFWSGYPYWGQGTLVT |
| | | VSS |
| 1N-86 | 3984 | EVQLVESGGGLVQPGGSLRLSCAASGDIFSINAMGWFRQAPGKEHEFVASISGSDKITN |
| | | YADSVKGRFTISADNSKNTAYLQMNSLKPEDTAVYYCAKFAVYDYWSGTSFDYWGQ |
| | | GTLVTVSS |
| 1N-87 | 3985 | EVQLVESGGGLVQPGGSLRLSCAASGFTFDRSWMGWFRQAPGKEREFVAAISGSGGST |
| | | NYADSVKGRFTISADNSKNTAYLQMNSLKPEDTAVYYCTSLVGLTAGFADYWGQGTL |
| | | VTVSS |
| 1N-88 | 3986 | EVQLVESGGGLVQPGGSLRLSCAASDSTFSIDVMGWFRQAPGKEREFVAAISWSAGST |
| | | LYADSVKGRFTISADNSKNTAYLQMNSLKPEDTAVYYCAAFDGYTGSDWGQGTLVTV |
| | | SS |
| 1N-89 | 3987 | EVQLVESGGGLVQPGGSLRLSCAASGDTFSWYAMGWFRQAPGKEREFVAVISWSGAY |
| | | TEYADSVKGRFTISADNSKNTAYLQMNSLKPEDTAVYYCAGDYDFWSGFDHWGQGT |
| | | LVTVSS |
| 1N-90 | 3988 | EVQLVESGGGLVQPGGSLRLSCAASGEEFSDHWMGWFRQAPGKEREFVGTINSGGDT |
| | | NYADSVKGRFTISADNSKNTAYLQMNSLKPEDTAVYYCARADNYFDYWGQGTLVTV |
| | | SS |
| 1N-91 | 3989 | EVQLVESGGGLVQPGGSLRLSCAASGSTFRINVMGWFRQAPGKEREFVAATSWSGGTT |
| | | VYADSVKGRFTISADNSKNTAYLQMNSLKPEDTAVYYCAAFDGYTGSDWGQGTLVT |
| | | VSS |
| 1N-92 | 3990 | EVQLVESGGGLVQPGGSLRLSCAASGGTFSTYGMGWFRQAPGKEREFVAAISWGGGS |
| | | DTLYADSVKGRFTISADNSKNTAYLQMNSLKPEDTAVYYCARDYGDYYYFDYWGQG |
| | | TLVTVSS |
| 1N-93 | 3991 | EVQLVESGGGLVQPGGSLRLSCAASGFTFDRSWMGWFRQAPGKEREFVTVITWSGGST |
| | | YYADSVKGRFTISADNSKNTAYLQMNSLKPEDTAVYYCAKGPSSGYAFDIWGQGTLV |
| | | TVSS |
| 1N-94 | 3992 | EVQLVESGGGLVQPGGSLRLSCAASGSIFETNTMGWFRQAPGKERELVASITSGGSTVY |
| | | ADSVKGRFTISADNSKNTAYLQMNSLKPEDTAVYYCTTVDQYFDYWGQGTLVTVSS |
| 1N-95 | 3993 | EVQLVESGGGLVQPGGSLRLSCAASGFTDGIDAMGWFRQAPGKESEWVSAISWNGSN |
| | | TYYADSVKGRFTISADNSKNTAYLQMNSLKPEDTAVYYCTTVDQYFDYWGQGTLVTV |
| | | SS |
| 1N-96 | 3994 | EVQLVESGGGLVQPGGSLRLSCAASGNTFSINVMGWFRQAPGKERELVAAISWSGAST |
| | | IYADSVKGRFTISADNSKNTAYLQMNSLKPEDTAVYYCAAFDGYSGSDWGQGTLVTV |
| | | SS |
| 1N-97 | 3995 | EVQLVESGGGLVQPGGSLRLSCAASGSDVWFNVMGWFRQAPGKERELVATITRALNT |
| | | AYADSVKGRFTISADNSKNTAYLQMNSLKPEDTAVYYCTTFNWNDEGFDYWGQGTL |
| | | VTVSS |
| 1N-98 | 3996 | EVQLVESGGGLVQPGGSLRLSCAASGSTFSVNVMGWFRQAPGKERELVAAISWSGAST |
| | | IYADSVKGRFTISADNSKNTAYLQMNSLKPEDTAVYYCAAFDGYTGSDWGQGTLVTV |
| | | SS |
| 1N-99 | 3997 | EVQLVESGGGLVQPGGSLRLSCAASGVTLDDYAMGWFRQAPGKEREWVSEITSGGYT |
| | | YADSVKGRFTISADNSKNTAYLQMNSLKPEDTAVYYCVRSNMAGFDHWGQGTLVTV |
| | | SS |
| 1N-100 | 3998 | EVQLVESGGGLVQPGGSLRLSCAASGDTYGSYWMGWFRQAPGKEREGISLITSDDGST |
| | | YYADSVKGRFTISADNSKNTAYLQMNSLKPEDTAVYYCAAFDGYSGSDWGQGTLVTV |
| | | SS |

TABLE 13
Variable Domain Light Chain Sequences

| | SEQ | |
|---|---|---|
| Variant | ID NO | Sequence |
| 1-1 | 3999 | QSALTQPASVSGSPGQSITISCTGTSSDVGSNNLVSWYQQHPGKAPKLMIYEGDKRPSG |
| | | VSNRFSGSKSGNTASLTISGLQAEDEADYYCCSYATGFYVFGGGTKLTVL |
| 1-2 | 4000 | QSALTQPASVSGSPGQSITISCTGTSSVGGYNLVSWYQQHPGKAPKLMIYEGSKRPSGV |
| | | SNRFSGSKSGNTASLTISGLQAEDEADYYCCSYAGSYTLAVFGGGTKLTVL |
| 1-3 | 4001 | QSALTQPASVSGSPGQSITISCTGTSSNVGSYNLVSWYQQHPGKAPKLMIYEGTKRPSG |
| | | VSNRFSGSKSGNTASLTISGLQAEDEADYYCCSYAGSSTFKAYVFGGGTKLTVL |
| 1-4 | 4002 | QSALTQPASVSGSPGQSITISCTGTSSDVGGYNLVSWYQQHPGKAPKLMIYEGTKRPSG |
| | | VSNRFSGSKSGNTASLTISGLQAEDEADYYCCSYAGSSTHYVFGGGTKLTVL |
| 1-5 | 4003 | QSALTQPASVSGSPGQSITISCTGTSSDVGSYHLVSWYQQHPGKAPKLMIYEGTKRPSG |
| | | VSNRFSGSKSGNTASLTISGLQAEDEADYYCCSYAGSYTFGVVFGGGTKLTVL |
| 1-6 | 4004 | QSALTQPASVSGSPGQSITISCTGTSSDVGSNNLVSWYQQHPGKAPKLMIYEGGKRPSG |
| | | VSNRFSGSKSGNTASLTISGLQAEDEADYYCCSYSGRYTYVFGGGTKLTVL |
| 1-7 | 4005 | QSALTQPASVSGSPGQSITISCTGTSSDVGNYNLVSWYQQHPGKAPKLMIYEGTKRPSG |
| | | VSNRFSGSKSGNTASLTISGLQAEDEADYYCCSYAGSYTFAVFGGGTKLTVL |
| 1-8 | 4006 | QSALTQPASVSGSPGQSITISCTGTSSDIGSYNLVSWYQQHPGKAPKLMIYEASRPSGV |
| | | SNRFSGSKSGNTASLTISGLQAEDEADYYCCSYAGSGIFYVFGGGTKLTVL |
| 1-9 | 4007 | QSALTQPASVSGSPGQSITISCTGTGSDVGYNLVSWYQQHPGKAPKLMIYEVSKRPSGV |
| | | SNRFSGSKSGNTASLTISGLQAEDEADYYCCSYAGSSTFEVFGGGTKLTVL |
| 1-10 | 4008 | QSALTQPASVSGSPGQSITISCTGTSSDVGDYNLVSWYQQHPGKAPKLMIYEGGKRPSG |
| | | VSNRFSGSKSGNTASLTISGLQAEDEADYYCCSYAGSSTNVVFGGGTKLTVL |
| 1-11 | 4009 | QSALTQPASVSGSPGQSITISCTGTSSDVGTYNLVSWYQQHPGKAPKLMIYEGYKRPSG |
| | | VSNRFSGSKSGNTASLTISGLQAEDEADYYCCSYAGNLWLFGGGTKLTVL |
| 1-12 | 4010 | QSALTQPASVSGSPGQSITISCTGTSSDVGHYNLVSWYQQHPGKAPKLMIYEGGKRPSG |
| | | VSNRFSGSKSGNTASLTISGLQAEDEADYYCCSYAGRDTYVAFGGGTKLTVL |
| 1-13 | 4011 | QSALTQPASVSGSPGQSITISCTGTSSDVGRYNLVSWYQQHPGKAPKLMIYEGTKRPSG |
| | | VSNRFSGSKSGNTASLTISGLQAEDEADYYCCSYAGSRTVVFGGGTKLTVL |
| 1-14 | 4012 | QSALTQPASVSGSPGQSITISCTGASSDVGSYNLVSWYQQHPGKAPKLMIYEGTKRPSG |
| | | VSNRFSGSKSGNTASLTISGLQAEDEADYYCCSYAGSSGVFGGGTKLTVL |
| 1-15 | 4013 | QSALTQPASVSGSPGQSITISCTGTSTDVGSYNLVSWYQQHPGKAPKLMIYEGFKRPSG |
| | | VSNRFSGSKSGNTASLTISGLQAEDEADYYCCSYAGSYTLGVFGGGTKLTVL |
| 1-16 | 4014 | QSALTQPASVSGSPGQSITISCTGTTSDVGSYNLVSWYQQHPGKAPKLMIYEGTKRPSG |
| | | VSNRFSGSKSGNTASLTISGLQAKDEADYYCSYTSSRTGVFGGGTKLTVL |
| 1-17 | 4015 | QSALTQPASVSGSPGQSITISCTATSSDVGSYNLVSWYQQHPGKAPKLMIYEGTKRPSG |
| | | VSNRFSGSKSGNTASLTISGLQAEDEADYYCCSYAGSWVFGGGTKLTVL |
| 1-18 | 4016 | QSALTQPASVSGSPGQSITISCTGTSSDVGSNNLVSWYQQHPGKAPKLMIYEGSKWPSG |
| | | VSNRFSGSKSGNTASLTISGLQAEDEADYYCCSFAGSSTDVVFGGGTKLTVL |
| 1-19 | 4017 | QSALTQPASVSGSPGQSITISCTGASSDVGSYNLVSWYQQHPGKAPKLMIYEGFKRPSG |
| | | VSNRFSGSKSGNTASLTISGLQAEDEADYYCCSYAGSHTYVFGGGTKLTVL |
| 1-20 | 4018 | QSALTQPASVSGSPGQSITISCTGTSSDVGSYYLVSWYQQHPGKAPKLMIYEGFKRPSG |
| | | VSNRFSGSKSGNTASLTISGLQAEDEADYYCCSYAGSLYVFGGGTKLTVL |
| 1-21 | 4019 | QSALTQPASVSGSPGQSITISCTGTSSDVGSYSLVSWYQQHPGKAPKLMIYEGDKRPSG |
| | | VSNRFSGSKSGNTASLTISGLQAEDEADYYCCSYAGSRRVFGGGTKLTVL |
| 1-22 | 4020 | QSALTQPASVSGSPGQSITISCTGSSSDVGSYNLVSWYQQHPGKAPKLMIYEGTKRPSG |
| | | VSNRFSGSKSGNTASLTISGLQAEDEADYYCCSYAGSSNWVFGGGTKLTVL |
| 1-23 | 4021 | QSALTQPASVSGSPGQSITISCTGTSSDVGYYNLVSWYQQHPGKAPKLMIYEGGKRPSG |
| | | VSNRFSGSKSGNTASLTISGLQAEDEADYYCCSYAGSSTPYVVFGGGTKLTVL |
| 1-24 | 4022 | QSALTQPASVSGSPGQSITISCTGTSSDVGSNNLVSWYQQHPGKAPKLMIYEGSKWPSG |
| | | VSNRFSGSKSGNTASLTISGLQAEDEADYYCCSFAGSSTDVVFGGGTKLTVL |
| 1-25 | 4023 | QSALTQPASVSGSPGQSITISCTGTSSDVGSSNLVSWYQQHPGKAPKLMIYEGDKRPSG |
| | | VSNRFSGSKSGNTASLTISGLQAEDEADYYCCSYAGSYGVVFGGGTKLTVL |
| 1-26 | 4024 | QSALTQPASVSGSPGQSITISCTGTSSDIGSYNLVSWYQQHPGKAPKLMIYEGFKRPSG |
| | | VSNRFSGSKSGNTASLTISGLQAEDEADYYCCSYAGSYSVVFGGGTKLTVL |
| 1-27 | 4025 | QSALTQPASVSGSPGQSITISCTGTSSDVGAYNLVSWYQQHPGKAPKLMIHEGNKRPSG |
| | | VSNRFSGSKSGNTASLTISGLQAEDEADYYCCSYAGDSFPYVFGGGTKLTVL |
| 1-28 | 4026 | QSALTQPASVSGSPGQSITISCTGTSRDVGSYNLVSWYQQHPGKAPKLMIYEASKRPSG |
| | | VSNRFSGSKSGNTASLTISGLQAEDEADYYCCSYAGSYTLYVFGGGTKLTVL |
| 1-29 | 4027 | QSALTQPASVSGSPGQSITISCTGTSSDVGHYNLVSWYQQHPGKAPKLMIYEGGKRPSG |
| | | VSNRFSGSKSGNTASLTISGLQAEDEADYYCCSYAGSSIYVFGGGTKLTVL |
| 1-30 | 4028 | QSALTQPASVSGSPGQSITISCTGTSSDVGNYNLVSWYQQHPGKAPKLMIYEGTKRPSG |
| | | VSNRFSGSKSGNTASLTISGLQAEDEADYYCCSYAGTVVFGGGTKLTVL |
| 1-31 | 4029 | QSALTQPASVSGSPGQSITISCTGTSSDVGKYNLVSWYQQHPGKAPKLMIYEGSQRPSG |
| | | VSNRFSGSKSGNTASLTISGLQAEDEADYYCCSYAGSSTVFGGGTKLTVL |
| 1-32 | 4030 | QSALTQPASVSGSPGQSITISCTGTSSDVGSNNLVSWYQQHPGKAPKLMIYEGDKRPSG |
| | | VSNRFSGSKSGNTASLTISGLQAEDEADYYCCSYTGSYTVVFGGGTKLTVL |
| 1-33 | 4031 | QSALTQPASVSGSPGQSITISCTGTSSDVGDYNLVSWYQQHPGKAPKLMIYEGGKRPSG |
| | | VSNRFSGSKSGNTASLTISGLQAEDEADYYCCSYAGSSTNVVFGGGTKLTVL |
| 1-34 | 4032 | QSALTQPASVSGSPGQSITISCTGTSSDVGKYNLVSWYQQHPGKAPKLMIYEASKRPSG |
| | | VSNRFSGSKSGNTASLTISGLQAEDEADYYCYSYAGSYTLGVFGGGTKLTVL |
| 1-35 | 4033 | QSALTQPASVSGSPGQSITISCTGTSSDVGSYNHVSWYQQHPGKAPKLMIYEGGKRPSG |
| | | VSNRFSGSKSGNTASLTISGLQAEDEADYYCCSYAGTTTPFVFGGGTKLTVL |
| 1-36 | 4034 | QSALTQPASVSGSPGQSITISCTGTSSDVGKYNLVSWYQQHPGKAPKLMIYETRKRPSG |
| | | VSNRFSGSKSGNTASLTISGLQAEDEADYYCCSYAGSSTVVFGGGTKLTVL |
| 2A-1 | 4035 | DIQMTQSPSSLSASVGDRVTITCRASQSIHRFLNWYQQKPGKAPKLLIYAASNLHSGVP |
| | | SRFSGSGSGTDFTLTISSLQPEDFATYYCQQSYGLPP-TFGQGTKVEIK |
| 2A-10 | 4036 | DIQMTQSPSSLSASVGDRVTITCRASQSIHISLNWYQQKPGKAPKLLIYLASPLASGVP |
| | | SRFSGSGSGTDFTLTISSLQPEDFATYYCQQSYSAPPYTFGQGTKVEIK |
| 2A-5 | 4037 | DIQMTQSPSSLSASVGDRVTITCRASQSIHTYLNWYQQKPGKAPKLLIYAASALASGVP |
| | | SRFSGSGSGTDFTLTISSLQPEDFATYYCQQSYSAPPYTFGQGTKVEIK |
| 2A-2 | 4038 | DIQMTQSPSSLSASVGDRVTITCRASQTINTYLNWYQQKPGKAPKLLIYSASTLQSGVP |
| | | SRFSGSGSGTDFTLTISSLQPEDFATYYCQQSYSTFTFGQGTKVEIK |
| 2A-4 | 4039 | DIQMTQSPSSLSASVGDRVTITCRASQSIDTYLNWYQQKPGKAPKLLIYAASALASGVP |
| | | SRFSGSGSGTDFTLTISSLQPEDFATYYCQQSYSAPPYTFGQGTKVEIK |
| 2A-6 | 4040 | DIQMTQSPSSLSASVGDRVTITCRASQSIDTYLNWYQQKPGKAPKLLIYAASALASGVP |
| | | SRFSGSGSGTDFTLTISSLQPEDFATYYCQQSYSAPPYTFGQGTKVEIK |
| 2A-11 | 4041 | DIQMTQSPSSLSASVGDRVTITCRASQSIGNYLNWYQQKPGKAPKLLIYGVSSLQSGVP |
| | | SRFSGSGSGTDFTLTISSLQPEDFATYYCQQSHSAPLTFGQGTKVEIK |
| 2A-12 | 4042 | DIQMTQSPSSLSASVGDRVTITCRASQSIDNYLNWYQQKPGKAPKLLIYGVSALQSGVP |
| | | SRFSGSGSGTDFTLTISSLQPEDFATYYCQQSHSAPPYFFGQGTKVEIK |
| 2A-13 | 4043 | DIQMTQSPSSLSASVGDRVTITCRASQSIDTYLNWYQQKPGKAPKLLIYGASALESGVP |
| | | SRFSGSGSGTDFTLTISSLQPEDFATYYCQQSHSAPPYFFGQGTKVEIK |
| 2A-14 | 4044 | DIQMTQSPSSLSASVGDRVTITCRASQSIDTYLNWYQQKPGKAPKLLIYGVSALQSGVP |
| | | SRFSGSGSGTDFTLTISSLQPEDFATYYCQQSYSAPPYFFGQGTKVEIK |
| 2A-7 | 4045 | DIQMTQSPSSLSASVGDRVTITCRASQSIDTYLNWYQQKPGKAPKLLIYAASALASGVP |
| | | SRFSGSGSGTDFTLTISSLQPEDFATYYCQQSYSAPPYTFGQGTKVEIK |
| 2A-8 | 4046 | DIQMTQSPSSLSASVGDRVTITCRASQSIDTYLNWYQQKPGKAPKLLIYAASALASGVP |
| | | SRFSGSGSGTDFTLTISSLQPEDFATYYCQQSYSAPPYTFGQGTKVEIK |
| 2A-15 | 4047 | DIQMTQSPSSLSASVGDRVTITCRASQSIDNYLNWYQQKPGKAPKLLIYGVSALQSGVP |
| | | SRFSGSGSGTDFTLTISSLQPEDFATYYCQQSHSAPLTFGQGTKVEIK |
| 2A-9 | 4048 | DIQMTQSPSSLSASVGDRVTITCRASQRIGTYLNWYQQKPGKAPKLLIYAASNLEGGVP |
| | | SRFSGSGSGTDFTLTISSLQPEDFATYYCQQNYSTTWTFGQGTKVEIK |
| 2A-21 | 4049 | DIQMTQSPSSLSASVGDRVTITCRASQSIHTYLNWYQQKPGKAPKLLIYAASALASGVP |
| | | SRFSGSGSGTDFTLTISSLQPEDFATYYCQQSYSAPPYTFGQGTKVEIK |
| 2A-22 | 4050 | DIQMTQSPSSLSASVGDRVTITCRASQSIHTYLNWYQQKPGKAPKLLIYAASALASGVP |
| | | SRFSGSGSGTDFTLTISSLQPEDFATYYCQQSYSAPPYTFGQGTKVEIK |
| 2A-23 | 4051 | DIQMTQSPSSLSASVGDRVTITCRASQTINTFLNWYQQKPGKAPKLLIYSASTLQSGVP |
| | | SRFSGSGSGTDFTLTISSLQPEDFATYYCQQSYSTFTFGGGTKVEIK |
| 2A-24 | 4052 | DIQMTQSPSSLSASVGDRVTITCRASQTIRTYLNWYRQKPGKAPKLLIYDASTLQRGVP |
| | | SRFSGSGSGTDFTLTISSLQPEDFATYYCQQSYRTPPWTFGGGTKVEIK |
| 2A-25 | 4053 | DIQMTQSPSSLSASVGDRVTITCRSSQSISSYLNWYQQKPGEAPKLLIYGASRLRSGVP |
| | | SRFSGSGSGTDFTLTISSLQPEDFATYYCQQGYSAPWTFGGGTKVEIK |
| 2A-26 | 4054 | DIQMTQSPSSLSASVGDRVTITCRASQSISGSLNWYQQKPGKAPKLLIYAESRLHSGVP |
| | | SRFSGSGSGTDFTLTISSLQPEDFATYYCQQSYSPPQTFGGGTKVEIK |
| 2A-27 | 4055 | DIQMTQSPSSLSASVGDRVTITCRASRSISTYLNWYQQKPGKAPKLLIYAASNLQGGVP |
| | | SRISGSGSGTDFTLTISSLQPEDFATYYCQQSHSIPRTFGGGTKVEIK |
| 2A-28 | 4056 | DIQMTQSPSSLSASVGDRVTITCRASQSIHTYLNWYQQKPGKAPKLLIYAASALASGVP |
| | | SRFSGSGSGTDFTLTISSLQPEDFATYYCQQSYSAPPYTFGQGTKVEIK |
| 3A-10 | 4057 | DIQMTQSPSSLSASVGDRVTITCRASQSIRKYLNWYQQKPGKAPKLLIYASSTLQRGVP |
| | | SRFSGSGSGTDFTLTISSLQPEDFATYYCQQSLSTPFTFGGGTKVEIK |
| 3A-4 | 4058 | DIQMTQSPSSLSASVGDRVTITCRASRSIRRYLNWYQQKPGKAPKLLIYASSSLQAGVP |
| | | SRFSGSGSGTDFTLTISSLQPEDFATYYCQQSYSTLLTFGQGTKVEIK |
| 3A-7 | 4059 | DIQMTQSPSSLSASVGDRVTITCRASQSIGRYLNWYQQKPGKAPKLLIYASSSLQSGVP |
| | | SRFSGSGSGTDFTLTISSLQPEDFATYYCQQSYSLPRTFGQGTKVEIK |
| 3A-1 | 4060 | DIQMTQSPSSLSASVGDRVTITCRASQTIYSYLNWYQQKPGKAPKLLIYATSTLQGGVP |
| | | SRFSGSGSGTDFTLTISSLQPEDFATYYCQHRGTFGQGTKVEIK |
| 3A-5 | 4061 | DIQMTQSPSSLSASVGDRVTITCRASQSIGRYLNWYQQKPGKAPKLLIYAASSLKSGVP |
| | | SRFSGSGSGTDFTLTISSLQPEDFATYYCQQSYSLPRTFGQGTKVEIK |
| 3A-6 | 4062 | DIQMTQSPSSLSASVGDRVTITCRASQSIGKYLNWYQQKPGKAPKLLIYASSSLQSGVP |
| | | SRFSGSGSGTDFTLTISSLQPEDFATYYCQQSYSPPFTFGQGTKVEIK |
| 3A-15 | 4063 | DIQMTQSPSSLSASVGDRVTITCRASQNIKTYLNWYQQKPGKAPKLLIYAASKLQSGVP |
| | | SRFSGSGSGTDFTLTISSLQPEDFATYYCQQSYSTSPTFGQGTKVEIK |
| 3A-3 | 4064 | DIQMTQSPSSLSASVGDRVTITCRASRSISRYLNWYQQKPGKAPKLLIYAASSLQAGVP |
| | | SRFSGSGSGTDFTLTISSLQPEDFATYYCQQSYSSLLTFGQGTKVEIK |
| 3A-11 | 4065 | DIQMTQSPSSLSASVGDRVTITCRASQSIGKYLNWYQQKPGKAPKLLIYASSTLQRGVP |
| | | SRFSGSGSGTDFTLTISSLQPEDFATYYCQQSLSPPFTFGQGTKVEIK |
| 3A-8 | 4066 | DIQMTQSPSSLSASVGDRVTITCRASQSIGRYLNWYQQKPGKAPKLLIYAASSLKSGVP |
| | | SRFSGSGSGTDFTLTISSLQPEDFATYYCQQSYSLPLTFGQGTKVEIK |
| 3A-2 | 4067 | DIQMTQSPSSLSASVGDRVTITCRTSQSINTYLNWYQQKPGKAPKLLIYGASNVQSGVP |
| | | SRFSGSGSGTDFTLTISSLQPEDFATYYCQQSYRIPRTFGQGTKVEIK |
| 3A-12 | 4068 | DIQMTQSPSSLSASVGDRVTITCRASQSIGKYLNWYQQKPGKAPKLLIYASSTLQRGVP |
| | | SRFSGSGSGTDFTLTISSLQPEDFATYYCQQSLSTPFTFGQGTKVEIK |
| 3A-14 | 4069 | DIQMTQSPSSLSASVGDRVTITCRASQSIGKYLNWYQQKPGKAPKLLIYASSTLQRGVP |
| | | SRFSGSGSGTDFTLTISSLQPEDFATYYCQQSFSTPFTFGQGTKVEIK |
| 3A-9 | 4070 | DIQMTQSPSSLSASVGDRVTITCRASQSIGRYLNWYQQKPGKAPKLLIYAASSLKSGVP |
| | | SRFSGSGSGTDFTLTISSLQPEDFATYYCQQSYSLPRTFGQGTKVEIK |
| 3A-13 | 4071 | DIQMTQSPSSLSASVGDRVTITCRASQSIGKYLNWYQQKPGKAPKLLIYASSTLQRGVP |
| | | SRFSGSGSGTDFTLTISSLQPEDFATYYCQQSFSPPFTFGQGTKVEIK |
| 3A-16 | 4072 | DIQMTQSPSSLSASVGDRVTITCRASQIIGSYLNWYQQKPGKAPKLLIYTTSNLQSGVP |
| | | SRFSGSGSGTDFTLTISSLQPEDFATYYCQQSYITPWTFGQGTKVEIK |
| 3A-17 | 4073 | DIQMTQSPSSLSASVGDRVTITCRASQSISRYINWYQQKPGKAPKLLIYEASSLESGVP |
| | | SRFSGSGSGTDFTLTISSLQPEDFATYYCQQSHITPLTFGQGTKVEIK |
| 3A-18 | 4074 | DIQMTQSPSSLSASVGDRVTITCRASQSIYTYLNWYQQKPGKAPKLLIYSASNLHSGVP |
| | | SRFSGSGSGTDFTLTISSLQPEDFATYYCQQSDTTPWTFGQGTKVEIK |
| 3A-19 | 4075 | DIQMTQSPSSLSASVGDRVTITCRASQSIATYLNWYQQKPGKAPKLLIYGASSLEGGVP |
| | | SRFSGSGSGTDFTLTISSLQPEDFATYYCQQTFSSPFTFGQGTKVEIK |
| 3A-2 | 4076 | DIQMTQSPSSLSASVGDRVTITCRASQNINTYLNWYQQKPGKAPKLLIYSASSLQSGVP |
| | | SRFSGSGSGTDFTLTISSLQPEDFATYYCQQSSLTPWTFGQGTKVEIK |
| 3A-21 | 4077 | DIQMTQSPSSLSASVGDRVTITCRASQGIATYLNWYQQKPGKAPKLLIYYASNLQSGVP |
| | | SRFSGSGSGTDFTLTISSLQPEDFATYYCQQSYSTRFTFGQGTKVEIK |
| 3A-22 | 4078 | DIQMTQSPSSLSASVGDRVTITCRASERISNYLNWYQQKPGKAPKLLIYTASNLESGVP |
| | | SRFSGSGSGTDFTLTISSLQPEDFATYYCQQSYTPPRTFGQGTKVEIK |
| 3A-23 | 4079 | DIQMTQSPSSLSASVGDRVTITCRASQSISSSLNWYQQKPGKAPKLLIYAASRLQDGVP |
| | | SRFSGSGSGTDFTLTISSLQPEDFATYYCQQSYSTPRSFGQGTKVEIK |
| 3A-24 | 4080 | DIQMTQSPSSLSASVGDRVTITCRASQSISSHLNWYQQKPGKAPKLLTYRASTLQSGVP |
| | | SRFSGSGSGTDFTLTISSLQPEDFATYYCQQTYNTPQTFGQGTKVEIK |
| 3A-25 | 4081 | DIQMTQSPSSLSASVGDRVTITCRASQSISSYLIWYQQKPGKAPKLLIYAASRLHSGVP |
| | | SRFSGSGSGTDFTLTISSLQPEDFATYYCQQGYNTPRTFGQGTKVEIK |
| 3A-26 | 4082 | DIQMTQSPSSLSASVGDRVTITCRASPSISTYLNWYQQKPGKAPKLLIYTASRLQTGVP |
| | | SRFSGSGSGTDFTLTISSLQPEDFATYYCQQTYSTPSSFGQGTKVEIK |
| 3A-27 | 4083 | DIQMTQSPSSLSASVGDRVTITCRASQNIAKYLNWYQQKPGKAPKLLIYGASGLQSGVP |
| | | SRFSGSGSGTDFTLTISSLQPEDFATYYCQQSHSPPITFGQGTKVEIK |
| 3A-28 | 4084 | DIQMTQSPSSLSASVGDRVTITCRASQSIGTYLNWYQQKPGKAPKLLIYAASNLHSGVP |
| | | SRFSGSGSGTDFTLTISSLQPEDFATYYCQESYSAPYTFGQGTKVEIK |
| 3A-29 | 4085 | DIQMTQSPSSLSASVGDRVTITCRASQSISPYLNWYQQKPGKAPKLLIYKASSLQSGVP |
| | | SRFSGSGSGTDFTLTISSLQPEDFATYYCQQSSSTPYTFGQGTKVEIK |
| 9-1 | 4086 | EIVLTQSPATLSLSPGERATLSCRASQGVSNYLAWYQQKPGQAPRLLIYDASNRATGIP |
| | | ARFSGSGSGTDFTLTISSLEPEDFAVYYCQQRYSWVTFGGGTKVEIK |
| 9-2 | 4087 | EIVLTQSPATLSLSPGERATLSCRASQSVSSSLAWYQQKPGQAPRLLIYDASNRATGIP |
| | | ARFSGSGSGTDFTLTISSLEPEDFAVYYCQQRINWPRSFGGGTKVEIK |
| 9-3 | 4088 | EIVLTQSPATLSLSPGERATLSCRASQSVNSYLAWYQQKPGQAPRLLIYDVSNRATGIP |
| | | ARFSGSGSGTDFTLTISSLEPEDFAVYYCQQFSNWPTFGGGTKVEIK |
| 9-4 | 4089 | EIVLTQSPATLSLSPGERATLSCRASQSVGTSLAWYQQKPGQAPRLLIYGASNRATGIP |
| | | ARFSGSGSGTDFTLTISSLEPEDFAVYYCQQRSNWQPFGGGTKVEIK |
| 9-5 | 4090 | EIVLTQSPATLSLSPGERATLSCRATQYVNSYLAWYQQKPRQAPRLIIYDVSNRATGIP |
| | | ARFSGSGSGTDFTLTISSLEPEDFAVYYCQQFSNWPTFGGGTKVEIK |
| 9-6 | 4091 | EIVLTQSPATLSLSPGERATLSCRASQSVGTSLAWYQQKPGQAPRLLIYGASNRATGIP |
| | | ARFSGSGSGTDFTLTISSLEPEDFAVYYCQLRSNWYTFGGGTKVEIK |
| 9-7 | 4092 | EIVLTQSPATLSLSPGERATLSCRASQGVSNYLAWYQQKPGQAPRLLIYDASNRATGIP |
| | | ARFSGSGSGTDFTLSISSLEPEDFAVYYCQQRYSWVTFGGGTKVEIK |
| 9-8 | 4093 | EIVLTQSPATLSLSPGERATLSCRASQGVSNYLAWYQQKPGQAPRLLIYDASNRATGIP |
| | | ARFSGSGSGTDFTLTISSLEPEDFAVYYCQQRYSWVTFGGGTKVEIK |
| 9-9 | 4094 | EIVLTQSPATLSLSPGERATLSCRASQSVDSRLAWYQQKPGQAPRLLIYDTSNRATGIP |
| | | ARFSGSGSGTDFTLTISSLEPEDFAVYYCQQRSTWPPVFGGGTKVEIK |
| 9-10 | 4095 | EIVLTQSPATLSLSPGERATLSCRASQSVRHHLAWYQQKPGQAPRLLIYDASNRATGIP |
| | | ARFSGSGSGTDFTLTISSLEPEDFAVYYCQQRTDWPRAFGGGTKVEIK |
| 9-11 | 4096 | EIVLTQSPATLSLSPGERATLSCRASQSVGNFLAWYQQKPGQAPRLLIYDASNRATGIP |
| | | ARFSGSGSGTDFTLTISSLEPEDFAVYYCQQSSTWPLTFGGGTKVEIK |
| 9-12 | 4097 | EIVLTQSPATLSLSPGERATLSCRASESISTYLAWYQQKPGQAPRLLIYDASNRATGIP |
| | | ARFSGSGSGTDFTLTISSLEPEDFAVYYCQQRSGLITFGGGTKVEIK |
| 9-13 | 4098 | EIVLTQSPATLSLSPGERATLSCRASQSVGDFLAWYQQKPGQAPRLLIYDTSNRATGIP |
| | | ARFSGSGSGTDFTLTISSLEPEDFAVYYCQQRSNLTFGGGTKVEIK |
| 9-14 | 4099 | DIQMTQSPSSLSASVGDRVTITCRASQTIRNSLNWYQQKPGKAPKLLIYASSSLQSGVP |
| | | SRFSGSGSGTDFTLTISSLQPEDFATYYCQQTHSIPKTFGQGTKVEIK |
| 9-15 | 4100 | EIVLTQSPATLSLSPGERATLSCRASQSVSSSLAWYQQKPGQAPRLLIYDASNRATGIP |
| | | ARFSGSGSGTDFTLTISSLEPEDFAVYYCQQRINWPRSFGGGTKVEIK |
| 10-1 | 4101 | EIVLTQSPATLSLSPGERATLSCRASQDVSTYLAWYQQKPGQAPRLLIYDASNRATGIP |
| | | ARFSGSGSGTDFTLTISSLEPEDFAVYYCQQRRDWPQTFGGGTKVEIK |
| 10-2 | 4102 | EIVLTQSPATLSLSPGERATLSCRASQDVSTYLAWYQQKPGQAPRLLIYDASNRATGIP |
| | | ARFSGSGSGTDFTPFITNFEPEDFAVYYCQQRRDWPQTFGGGTKVEIK |
| 10-3 | 4103 | EIVLTQSPATLSLSPGERATLSCRASQDVSTYLAWYQQKPGQAPRLLIYDASNRATGIP |
| | | ARFSGSGSGTDFTPFITNFEPEDFAVYYCQQRRDWPQTFGGGTKVEIK |
| 10-4 | 4104 | EIVLTQSPATLSLSPGERATLSCRASQDVSTYLAWYQQKPGQAPRLLIYDASNRATGIP |
| | | ARFSGSGSGTDFTLFITNFEPEDFAVYYCQQRRDWPQTFGGGTKVEIK |
| 10-5 | 4105 | EIVLTQSPATLSLSPGERATLSCRASQDVSTYLAWYQQKPGQAPRLLIYDASNRATGIP |
| | | ARFSGSGSGTDFTLTISSFEPEDFAVYYCQQRRDWPQTFGGGTKVEIK |
| 10-6 | 4106 | EIVLTQSPATLSLSPGERATLSCRASQDVSTYLAWYQQKPGQAPRLLIYDASNRATGIP |
| | | ARFSGSGSGTDFTPFITNFEHEDFAVYYCQQRRDWPQTFGGGTKVEIK |
| 11-1 | 4107 | EIVLTQSPATLSLSPGERATLSCRASQSLGSFLAWYQQKPGQAPRLLIYDASNRATGIP |
| | | ARFSGSGSGTDFTLTISSLEPEDFAVYYCQQRALWPRLTFGGGTKVEIK |
| 11-2 | 4108 | EIVLTQSPATLSLSPGERATLSCRASQSVNSYLAWYQQKPGQAPRLLIYDVSNRATGIP |
| | | ARFSGSGSGTDFTLTISSLEPEDFAVYYCQQFSNWPTFGGGTKVEIK |
| 11-3 | 4109 | EIVLTQSPATLSLSPGERATLSCRASQNIGNHLAWYQQKPGQAPRLLIYDASNRATGIP |
| | | ARFSGSGSGTDFTLTISSLEPEDFAVYYCQQRDNGPPEGTFGGGTKVEIK |
| 11-4 | 4110 | EIVLTQSPATLSLSPGERATLSCRASQSVGSYLAWYQQKPGQAPRLLIYDAVNRATGIP |
| | | ARFSGSGSGTDFTLTISSLEPEDFAVYYCQQRFTWPTTFGGGTKVEIK |
| 11-5 | 4111 | EIVLTQSPATLSLSPGERATLSCRASQSITDYLAWYQQKPGQAPRLLIYDASNRATGIP |
| | | ARFSGSGSGTDFTLTISSLEPEDFAVYYCHQRNNWPPTFGGGTKVEIK |
| 11-6 | 4112 | EIVLTQSPATLSLSPGERATLSCRASQSVDSSLAWYQQKPGQAPRLLIYDASNRATGIP |
| | | ARFSGSGSGTDFTLTISSLEPEDFAVYYCQQQSNWPGTFGGGTKVEIK |
| 11-7 | 4113 | EIVLTQSPATLSLSPGERATLSCRASQSIGSYLAWYQQKPGQAPRLLIYDGSNRATGIP |
| | | ARFSGSGSGTDFTLTISSLEPEDFAVYYCQQRTNWPLFSFGGGTKVEIK |
| 11-8 | 4114 | EIVLTQSPATLSLSPGERATLSCRASQTVTNYLAWYQQKPGQAPRLLIYDTSNRATGIP |
| | | ARFSGSGSGTDFTLTISSLEPEDFAVYYCQHRDDWPPTFGGGTKVEIK |
| 11-9 | 4115 | EIVLTQSPATLSLSPGERATLSCRASQSVSYYLAWYQQKPGQAPRLLIYDSSNRATGIP |
| | | ARFSGSGSGTDFTLTISSLEPEDFAVYYCQQRSNWQGNFGGGTKVEIK |
| 11-10 | 4116 | EIVLTQSPATLSLSPGERATLSCRASQSVSTSLAWYQQKPGQAPRLLIYDATNRATGIP |
| | | ARFSGSGSGTDFTLTISSLEPEDFAVYYCQQHYSWPLTFGGGTKVEIK |
| 11-11 | 4117 | EIVLTQSPATLSLSPGERATLSCRASHNINNFLAWYQQKPGQAPRLLIYDTSNRATGIP |
| | | ARFSGSGSGTDFTLTISSLEPEDFAVYYCQQGRNWPPSSFGGGTKVEIK |
| 11-12 | 4118 | EIVLTQSPATLSLSPGERATLSCRASQSVGTSLAWYQQKPGQAPRLLIYGASNRATGIP |
| | | ARFSGSGSGTDFTLTISSLEPEDFAVYYCQERSNWPDTFGGGTKVEIK |
| 11-13 | 4119 | EIVLTQSPATLSLSPGERATLSCRASQSVSSQLAWYQQKPGQAPRLLMYDTSNRATGIP |
| | | ARFSGSGSGTDFTLTISSLEPEDFAVYYCQQRYNWPSTFGGGTKVEIK |
| 11-14 | 4120 | EIVLTQSPATLSLSPGERATLSCRASQSVDSRLAWYQQKPGQAPRLLIYDASNRATGIP |
| | | ARFSGSGSGTDFTLTISSLEPEDFAVYYCQQRTNLPPSITFGGGTKAKLK |
| 11-15 | 4121 | EMVVPQSPPTVSLSPGERATLSCRASQSVGSYLAWYQQKPGQAPRLLIYDAVNRATGIP |
| | | ARFSGSGSGTDFTLTISSLEPEDFAVYYCQQRSDSITFGGGTKVEIK |
| 11-16 | 4122 | EIVLTQSPATLSLSPGERATLSCRASQSLGRYLAWYQQKPGQAPRLLIYDSSNRATGIP |
| | | ARFSGSGSGTDFTLTISSLEPEDFAVYYCQQYGDWPETFGGGTKVEIK |
| 11-17 | 4123 | EIVLTQSPATLSLSPGERATLSCRASQNIGSHLAWYQQKPGQAPRLLIYDVSNRATGIP |
| | | ARFSGSGSGTDFTLTISSLEPEDFAVYYCQQRDYWPPYTFGGGTKVEIK |
| 11-18 | 4124 | EIVLTQSPATLSLSPGERATLSCRASQSLTSYLAWYQQKPGQAPRLLIYDASNRATGIP |
| | | ARFSGSGSGTDFTLTISSLEPEDFAVYYCQQRHYWPPITFGGGTKVEIK |
| 11-19 | 4125 | EIVLTQSPATLSLSPGERATLSCRASQSIGSYLAWYQQKPGQAPRLLIYDASNRATGIP |
| | | ARFSGSGSGTDFTLTISSLEPEDFAVYYCQQRDSWPHTFGGGTKVEIK |
| 11-20 | 4126 | EIVLTQSPATLSLSPGERATLSCRASQSVGSYLAWYQQKPGQAPRLLIYDAVNRATGIP |
| | | ARFSGSGSGTDFTLTISSLEPEDFAVYYCQQRSLWPFGGGTKVEIK |
| 12-1 | 4127 | EIVLTQSPATLSLSPGERATLSCRASQSVSSHLAWYQQKPGQAPRLLIYDVSNRATGIP |
| | | ARFSGSGSGTDFTLTISSLEPEDFAVYYCQQRDTFTFGGGTKVEIK |
| 12-2 | 4128 | EIVLTQSPATLSLSPGERATLSCRASQSVDSRLAWYQQKPGQAPRLLIYDTSNRATGIP |
| | | ARFSGSGSGTDFTLTISSLEPEDFAVYYCQQRSTWPPVFGGGTKVEIK |
| 12-3 | 4129 | EIVLTQSPATLSLSPGERATLSCRASQSVGDFLAWYQQKPGQAPRLLIYDTSNRATGIP |
| | | ARFSGSGSGTDFTLTISSLEPEDFAVYYCQYRSNFTFGGGTKVEIK |
| 12-4 | 4130 | EIVLTQSPATLSLSPGERATLSCRASQSVGSHLAWYQQKPGQAPRLLIYDASNRATGIP |
| | | SRFSGSGSGTDFTLTISSLEPEDFAVYYCQQISNWPLTFGGGTKVEIK |
| 12-5 | 4131 | EIVLTQSPATLSLSPGERATLSCRASQNVGQSLAWYQQKPGQAPRLLIYDASNRATGIP |
| | | ARFSGSGSGTDFTLTISSLEPEDFAVYYCQQRENWPPTFGGGTKVEIK |
| 12-6 | 4132 | EIVLTQSPATLSLSPGERATLSCRASQSLGNYLAWYQQKPGQAPRLLIYDSSNRATGIP |
| | | ARFSGSGSGTDFTLTISSLEPEDFAVYYCQQRNWPYTFGGGTKVEIK |
| 12-7 | 4133 | EIVLTQSPATLSLSPGERATLSCRASQSLGNYLAWYQQKPGQAPRLLIYDSSNRATGIP |
| | | ARFSGSGSGTDFTLTISSLEPEDFAVYYCQQRTDWPPSFGGGTKVEIK |
| 12-8 | 4134 | EIVLTQSPATLSLSPGERATLSCRASQNIGNHLAWYQQKPGQAPRLLIYDVSNRATGIP |
| | | ARFSGSGSGTDFTLTISSLEPEDFAVYYCQQRKSWPPFTFGGGTKVEIK |
| 12-9 | 4135 | EIVLTQSPATLSLSPGERATLSCRASQSVSTSLAWYQQKPGQAPRLLIYDATNRATGIP |
| | | ARFSGSGSGTDFTLTISSLEPEDFAVYYCQRRTDWPPTFGGGTKVEIK |
| 12-10 | 4136 | EIVLTQSPATLSLSPGERATLSCRASQSVNSDLAWYQQKPGQAPRLLIYDASNRATGIP |
| | | ARFSGSGSGTDFTLTISSLEPEDFAVYYCQQRTDWPPATFGGGTKVEIK |
| 12-11 | 4137 | EIVLTQSPATLSLSPGERATLSCRASQSVGSYLAWYQQKPGQAPRLLIYDAVNRATGIP |
| | | ARFSGSGSGTDFTLTISSLEPEDFAVYYCQQRFTWPTTFGGGTKVEIK |
| 12-12 | 4138 | EIVLTQSPATLSLSPGERATLSCRASQSVSSSLAWYQQKPGQAPRLLIYDASNRATGIP |
| | | ARFSGSGSGTDFTLTISSLEPEDFAVYYCQHRDDWPPTFGGGTKVEIK |
| 12-13 | 4139 | EIVLTQSPATLSLSPGERATLSCRASQSVGSYLAWYQQKPGQAPRLLIYDAVNRATGIP |
| | | ARFSGSGSGTDFTLTISSLEPEDFAVYYCQQRNSWPPATFGGGTKVEIK |
| 12-14 | 4140 | EIVLTQSPATLSLSPGERATLSCRASQSVGSYLAWYQQKPGQAPRLLIYDAVNRATGIP |
| | | ARFSGSGSGTDFTLTISSLEPEDFAVYYCQQVSNWPLTFGGGTKVEIK |
| 12-15 | 4141 | EIVLTQSPATLSLSPGERATLSCRASQSVSSHLAWYQQKPGQAPRLLIYDVSNRATGIP |
| | | ARFSGSGSGTDFTLTISSLEPEDFAVYYCQVRSDWPPLTFGGGTKVEIK |
| 12-16 | 4142 | EIVLTQSPATLSLSPGERATLSCRASQSLDSYLAWYQQKPGQAPRLLIYDVSNRATGIP |
| | | ARFSGSGSGTDFTLTISSLEPEDFAVYYCQQRRGWPPVTFGGGTKVEIK |
| 12-17 | 4143 | EIVLTQSPATLSLSPGERATLSCRASQSVSKFLAWYQQKPGQAPRLLIYDASNRATGIP |
| | | ARFSGSGSGTDFTLTISSLEPEDFAVYYCHQHSDWPLTFGGGTKVEIK |
| 12-18 | 4144 | EIVLTQSPATLSLSPGERATLSCRASQSIGGSLAWYQQKPGQAPRLLIYDASNRATGIP |
| | | ARFSGSGSGTDFTLTISSLEPEDFAVYYCQQRYSYFTFGGGTKVEIK |
| 12-19 | 4145 | EIVLTQSPATLSLSPGERATLSCRASQSISRYLAWYQQKPGQAPRLLIYDVSNRATGIP |
| | | ARFSGSGSGTDFTLTISSLEPEDFAVYYCQQSSNWPLFTFGGGTKVEIK |
| 12-20 | 4146 | EIVLTQSPATLSLSPGERATLSCRASQSLGNYLAWYQQKPGQAPRLLIYDSSNRATGIP |
| | | ARFSGSGSGTDFTLTISSLEPEDFAVYYCQQRNTWPGVTFGGGTKVEIK |
| 12-21 | 4147 | EIVLTQSPATLSLSPGERATLSCRASQSVNSDLAWYQQKPGQAPRLLIYDASNRATGIP |
| | | ARFSGSGSGTDFTLTISSLEPEDFAVYYCQERSLFGGGTKVEIK |
| 12-22 | 4148 | EIVLTQSPATLSLSPGERATLSCRASQSVRHHLAWYQQKPGQAPRLLIYDASNRATGIP |
| | | ARFSGSGSGTDFTLTISSLEPEDFAVYYCQERSDWPITFGGGTKVEIK |
| 12-23 | 4149 | EIVLTQSPATLSLSPGERATLSCRASQSVDSRLAWYQQKPGQAPRLLIYDASNRATGIP |
| | | ARFSGSGSGTDFTLTISSLEPEDFAVYYCQQRSTWPPVFGGGTKVEIK |
| 12-24 | 4150 | EIVLTQSPATLSLSPGERATLSCRASQSFGDSLAWYQQKPGQAPRLLIYDASNRATGIP |
| | | ARFSGSGSGTDFTLTISSLEPEDFAVYYCQQRSIPITFGGGTKVEIK |
| 12-25 | 4151 | EIVLTQSPATLSLSPGERATLSCRASQSVNSYLAWYQQKPGQAPRLLIYDVSNRATGIP |
| | | ARFSGSGSGTDFTLTISSLEPEDFAVYYCQERGNWPPFTFGGGTKVEIK |
| 12-26 | 4152 | EIVLTQSPATLSLSPGERATLSCRASQSVSTSLAWYQQKPGQAPRLLIYDISNRATGIP |
| | | ARFSGSGSGTDFTLTISSLEPEDFAVYYCQQRRSGLTFGGGTKVEIK |
| 12-27 | 4153 | EIVLTQSPATLSLSPGERATLSCRASDTVSSYLAWYQQKPGQAPRLLIYDTSNRATGIP |
| | | ARFSGSGSGTDFTLTISSLEPEDFAVYYCQQRASWPLSFGGGTKVEIK |
| 12-28 | 4154 | EIVLTQSPATLSLSPGERATLSCRASQSVRHHLAWYQQKPGQAPRLLIYDASNRATGIP |
| | | ARFSGSGSGTDFTLTISSLEPEDFAVYYCQQSGSWPLTFGGGTKVEIK |
| 12-29 | 4155 | EIVLTQSPATLSLSPGERATLSCRASQIISSYLAWYQQKPGQAPRLLIYDTSNRATGIP |
| | | ARFSGSGSGTDFTLTISSLEPEDFAVYYCQVRSNWPPLTFGGGTKVEIK |
| 12-30 | 4156 | EIVLTQSPATLSLSPGERATLSCRASHNIGTYLAWYQQKPGQAPRLLIYDVSNRATGIP |
| | | ARFSGSGSGTDFTLTISSLEPEDFAVYYCQQRADWPQTFGGGTKVEIK |
| 12-31 | 4157 | EIVLTQSPATLSLSPGERATLSCRASQSIGSYLAWYQQKPGQAPRLLIYDVSNRATGIP |
| | | ARFSGSGSGTDFTLTISSLEPEDFAVYYCQQRDSFTFGGGTKVEIK |
| 12-32 | 4158 | EIVLTQSPATLSLSPGERATLSCRASQSIGSYLAWYQQKPGQAPRLLIYDVSNRATGIP |
| | | ARFSGSGSGTDFTLTISSLEPEDFAVYYCQQRDSFTFGGGTKVEIK |
| 12-33 | 4159 | EIVLTQSPATLSLSPGERATLSCRASQDVSTYLAWYQQKPGQAPRLLIYDASNRATGIP |
| | | ARFSGSGSGTDFTLTISSLEPEDFAVYYCQQRAYWPGTFGGGTKVEIK |
| 12-34 | 4160 | EIVLTQSPATLSLSPGERATLSCRASQSVGNFLAWYQQKPGQAPRLLIYDASNRATGIP |
| | | ARFSGSGSGTDFTLTISSLEPEDFAVYYCQHRRLLTFGGGTKVEIK |
| 12-35 | 4161 | EIVLTQSPATLSLSPGERATLSCRASQRVSSYLAWYQQKPGQAPRLLIYDAFNRATGIP |
| | | ARFSGSGSGTDFTLTISSLEPEDFAVYYCQQRQDWPLTFGGGTKVEIK |
| 12-36 | 4162 | EIVLTQSPATLSLSPGERATLSCRASQGISTYLAWYQQKPGQAPRLLIYDASNRATGIP |
| | | ARFSGSGSGTDFTLTISSLEPEDFAVYYCQQRRRWPPTFGGGTKVEIK |
| 12-37 | 4163 | EIELTQSPATLSLSPGERATLSCRASESVSESLAWYQQKPGQAPRLLIYDASNRATGIP |
| | | ARFSGSGSGTDFTLTISSLEPEDFAVYYCQQRTHGVTFGGGTKVEIK |
| 12-38 | 4164 | EIVLTQSPATLSLSPGERATLSCRASQSVSTSLAWYQQKPGQAPRLLIYDATNRATGIP |
| | | ARFSGSGSGTDFTLTISSLEPEDFAVYYCQQRQKWPLTFGGGTKVEIK |
| 12-39 | 4165 | EIVLTQSPATLSLSPGERATLSCRASESISTYLAWYQQKPGQAPRLLIYDASNRATGIP |
| | | ARFSGSGSGTDFTLTISSLEPEDLAVYYCQQRRNSLTFGGGTKVEIK |
| 12-40 | 4166 | EIVLTQSPATLSLSPGERATLSCRASQSVNSDLAWYQQKPGQAPRLLIYDASNRATGIP |
| | | ARFSGSGSGTDFTLTISSLEPEDFAVYYCQQRSTWSPLTFGGGTKVEIK |
| 12-41 | 4167 | EIVLTQSPATLSLSPGERATLSCRASQNVGQSLAWYQQKPGQAPRLLIYDASNRATGIP |
| | | ARFSGSGSGTDFTLTISSLEPEDFAVYYCQLRTNWPPVTFGGGTKVEIK |
| 12-42 | 4168 | EIVLTQSPATLSLSPGERATLSCRASQSVDSRLAWYQQKPGQAPRLLIYDTSNRATGIP |
| | | ARFSGSGSGTDFTLTISSLEPEDFAVYYCQQRSSNWTFGGGTKVEIK |
| 12-43 | 4169 | EIVLTQSPATLSLSPGERATLSCRASQSVGKSLAWYQQKPGQAPRLLIYDTSNRATGIP |
| | | ARFSGSGSGTDFTLTISSLEPEDFAVYYCQQRGSFPLTFGGGTKVEIK |
| 13-1 | 4170 | EIVLTQSPATLSLSPGERATLSCRASQSVGDFLAWYQQKPGQAPRLLIYDTSNRATGIP |
| | | ARFSGSGSGTDFTLTISSLEPEDFAVYYCQQRSIRGTFGGGTKVEIK |
| 13-2 | 4171 | EIVLTQSPATLSLSPGERATLSCRASDTVSSYLAWYQQKPGQAPRLLIYDTSNRATGIP |
| | | ARFSGSGSGTDFTLTISSLEPEDFAVYYCQQRGGWPPAFGGGTKVEIK |
| 13-3 | 4172 | DIQMTQSPSSLSASVGDRVTITCRASQSIGDYLNWYQQKPGKAPKLLIYEASSLQSGVP |
| | | SRFSGSGSGTDFTLTISSLQPEDFATYYCLHTYLPPYSFGQGTKVEIK |
| 13-4 | 4173 | DIQMTQSPSSLSASVGDRVTITCRASQSITRYLNWYQQKPGKAPKLLIYAASSLQSGVP |
| | | SRFSGSGSGTDFTLTISSLQPEDFATYYCQQTYNFPHTFGQGTKVEIK |
| 13-5 | 4174 | EIVLTQSPATLSLSPGERATLSCRASQSIGSYLAWYQQKPGQAPRLLIYDVSNRATGIP |
| | | ARFSGSGSGTDFTLTISSFEPEDFAVYYCQQRHHWPPVTFGGGTKVEIK |

TABLE 14
Antibody Sequences

| | SEQ | |
|---|---|---|
| Antibody | ID NO | Sequence |
| Antibody 1 | 4175 | EVQLVESGGGLVQPGGSLRLSCAASGSTFSIN |
| | | AMGWFRQAPGKEREFVAGITSSGGYTNYADSV |
| | | KGRFTISADNSKNTAYLQMNSLKPEDTAVYYC |
| | | AADGVPEYSDYASGPVWGQGTLVTVSSGGGGS |
| | | GGGGSASEVQLVESGGGLVQPGGSLRLSCAAS |
| | | GFTFSPSWMGWFRQAPGKEREFVATINEYGGR |
| | | NYADSVKGRFTISADNSKNTAYLQMNSLKPED |
| | | TAVYYCARVDRDFDYWGQGTLVTVSSGGGGSE |
| | | PKSSDKTHTCPPCPAPELLGGPSVFLFPPKPK |
| | | DTLMISRTPEVTCVVVDVSHEDPEVKFNWYVD |
| | | GVEVHNAKTKPREEQYNSTYRVVSVLTVLHQD |
| | | WLNGKEYKCKVSNKALPAPIEKTISKAKGQPR |
| | | EPQVYTLPPSREEMTKNQVSLTCLVKGFYPSD |
| | | IAVEWESNGQPENNYKTTPPVLDSDGSFFLYS |
| | | KLTVDKSRWQQGNVFSCSVMHEALHNHYTQKS |
| | | LSLSPG |
| Antibody 2 | 4176 | EVQLVESGGGLVQPGGSLRLSCAASGFTFSPS |
| | | WMGWFRQAPGKEREFVATINEYGGRNYADSVK |
| | | GRFTISADNSKNTAYLQMNSLKPEDTAVYYCA |
| | | RVDRDFDYWGQGTLVTVSSGGGGSEPKSSDKT |
| | | HTCPPCPAPELLGGPSVFLFPPKPKDTLMISR |
| | | TPEVTCVVVDVSHEDPEVKFNWYVDGVEVHNA |
| | | KTKPREEQYNSTYRVVSVLTVLHQDWLNGKEY |
| | | KCKVSNKALPAPIEKTISKAKGQPREPQVYTL |
| | | PPSREEMTKNQVSLTCLVKGFYPSDIAVEWES |
| | | NGQPENNYKTTPPVLSDGSFFLYSKLTVDKSR |
| | | WQQGNVFSCSVMHEALHNHYTQKSLSLSPGGG |
| | | GGSGGGGSASEVQLVESGGGLVQPGGSLRLSC |
| | | AASGSTFSINAMGWFRQAPGKEREFVAGITSS |
| | | GGYTNYADSVKGRFTISADNSKNTAYLQMNSL |
| | | KPEDTAVYYCAADGVPEYSDYASGPVWGQGTL |
| | | VTVSS |

[0233] While preferred embodiments of the present disclosure have been shown and described herein, it will be obvious to those skilled in the art that such embodiments are provided by way of example only. Numerous variations, changes, and substitutions will now occur to those skilled in the art without departing from the disclosure. It should be understood that various alternatives to the embodiments of the disclosure described herein may be employed in practicing the disclosure. It is intended that the following claims define the scope of the disclosure and that methods and structures within the scope of these claims and their equivalents be covered thereby.

1. A device for detecting a virus in a sample comprising:
a) a sample application pad for receiving the sample; and
b) a membrane substrate comprising a first test line, the first test line comprising an immobilized antibody or antibody fragment, wherein the immobilized antibody or antibody fragment comprises a predetermined number of variants within a complementarity determining region (CDR) relative to a reference antibody or antibody fragment, and wherein the immobilized antibody or antibody fragment comprises at least a 2.5× higher binding affinity than a binding affinity of the reference antibody or antibody fragment.

2. The device of claim 1, wherein the device is a lateral flow immunoassay.

3-6. (canceled)

7. The device of claim 1, wherein the immobilized antibody comprises an amino acid sequence comprising at least about 80% sequence identity to any one of SEQ ID NOs: 1-4212.

8-17. (canceled)

18. The device of claim 1, wherein the CDR comprises at least one variant relative to the reference antibody or antibody fragment.

19. The device of claim 1, wherein the CDR is a CDR1, CDR2, and CDR3 on a heavy chain.

20. The device of claim 1, wherein the CDR is a CDR1, CDR2, and CDR3 on a light chain.

21. The device of claim 1, wherein the immobilized antibody comprises an EC50 of less than about 5 nM.

22. (canceled)

23. The device of claim 1, wherein the immobilized antibody comprises a binding affinity of less than about 100 nM.

24-29. (canceled)

30. The device of claim 1, wherein the sample comprises saliva, blood, semen, vaginal fluid, or urine.

31. The device of claim 1, wherein the sample comprises saliva.

32. The device of claim 1, wherein the membrane substrate further comprises at least one control line.

33. The device of claim 1, wherein the device further comprises a backing.

34. The device of claim 1, wherein the device further comprises a wicking pad.

35. The device of claim 1, wherein the device comprises a sensitivity of at least about 70% for detecting the virus.

36. The device of claim 1, wherein the device detects viral titers in a range of about 10³ to about 10⁴ viral particles.

37. The device of claim 1, wherein the device comprises a specificity of at least about 70% for detecting the virus as compared to another virus.

38. The device of claim 1, wherein the device is specific for detecting SARS-CoV-2.

39. (canceled)

40. A method of detecting a virus, the method comprising:
a) contacting a sample comprising the virus with a device of claim 1; and
b) detecting the virus if the first test line undergoes a color change.

41. The method of claim 40, wherein the method detects the virus in at most about 20 minutes.

42. (canceled)

43. A kit comprising:
a) a device of claim 1, and
b) instructions for use thereof.

The application's sequence listing, which the Patent Office published only in electronic form, follows.

SEQUENCE LISTING (4216 sequences)

SEQ ID NO: 1 - protein, 108 aa, Artificial Sequence
  Description of Artificial Sequence: Synthetic polypeptide
DIQMTQSPSSLSASVGDRVTITCRASQSIDTYLNWYQQKPGKAPKLLIYAASALASGVPSRFSGSGSGTDFTLTISSLQPEDFATYYCQQSYSAPPYTFGQGTKVEIK

SEQ ID NO: 2 - protein, 117 aa, Artificial Sequence
  Description of Artificial Sequence: Synthetic polypeptide
EVQLLESGGGLVQPGGSLRLSCAASGFTFSNYPMNWVRQAPGKGLEWVSTISGSGGNTFYADSVKGRFTISRDNSKNTLYLQMNSLRAEDTAVYYCVRHDEYSFDYWGQGTLVTVSS

SEQ ID NO: 3 - protein, 111 aa, Artificial Sequence
  Description of Artificial Sequence: Synthetic polypeptide
QSALTQPASVSGSPGQSITISCTGTSSDVGHYNLVSWYQQHPGKAPKLMIYEGTKRPSGVSNRFSGSKSGNTASLTISGLQAEDEADYYCCSYAGSSSFVVFGGGTKLTVL

SEQ ID NO: 4 - protein, 127 aa, Artificial Sequence
  Description of Artificial Sequence: Synthetic polypeptide
EVQLLESGGGLVQPGGSLRLSCAASGITFSSYAMSWVRQAPGKGLEWVSGISGSGGSTYYADSVKGRFTISRDNSKNTLYLQMNSLRAEDTAVYYCAKHGSGTIFGVVIAKYYFDYWGQGTLVTVSS

SEQ ID NO: 5 - protein, 106 aa, Artificial Sequence
  Description of Artificial Sequence: Synthetic polypeptide
DIQMTQSPSSLSASVGDRVTITCRASQTINTFLNWYQQKPGKAPKLLIYSASTLQSGVPSRFSGSGSGTDFTLTISSLQPEDFATYYCQQSYSTFTFGGGTKVEIK

SEQ ID NO: 6 - protein, 129 aa, Artificial Sequence
  Description of Artificial Sequence: Synthetic polypeptide
EVQLLESGGGLVQPGGSLRLSCAASGFTFSRHAMNWVRQAPGKGLEWVSGITGSGDETYYADSVKGRFTISRDNSKNTLYLQMNSLKAEDTAVYYCARDLPASYYDSSGYYWHNGMDVWGQGTLVTVSS

SEQ ID NO: 7 - protein, 106 aa, Artificial Sequence
  Description of Artificial Sequence: Synthetic polypeptide
DIQMTQSPSSLSASVGDRVTITCRASQTINTYLNWYQQKPGKAPKLLIYSASTLQSGVPSRFSGSGSGTDFTLTISSLQPEDFATYYCQQSYSTFTFGQGTKVEIK

SEQ ID NO: 8 - protein, 129 aa, Artificial Sequence
  Description of Artificial Sequence: Synthetic polypeptide
EVQLLESGGGLVQPGGSLRLSCAASGFTFSRHAMNWVRQAPGKGLEWVSGISGSGDETYYADSVKGRFTISRDNSKNTLYLQMNSLRAEDTAVYYCARDLPASYYDSSGYYWHNGMDVWGQGTLVTVSS

SEQ ID NO: 9 - protein, 110 aa, Artificial Sequence
  Description of Artificial Sequence: Synthetic polypeptide
QSALTQPASVSGSPGQSITISCTGTSSDVGSYYLVSWYQQHPGKAPKLMIYEGDKRPSGVSNRFSGSKSGNTASLTISGLQAEDEADYYCCSHAGRYPYVFGGGTKLTVL

SEQ ID NO: 10 - protein, 122 aa, Artificial Sequence
  Description of Artificial Sequence: Synthetic polypeptide
EVQLLESGGGLVQPGGSLRLSCAASGFMFSSYAMSWVRQAPGKGLEWVSAISGSGGSTYYTDSVKGRFTISRDNSKNTLYLQMNSLRAEDTAVYYCAKDGASGWPNWHFDLWGQGTLVTVSS

SEQ ID NO: 11 - protein, 111 aa, Artificial Sequence
  Description of Artificial Sequence: Synthetic polypeptide
QSALTQPASVSGSPGQSITISCTGTSSDVGSYSLVSWYQQHPGKAPKLMIYEGTKRPSGVSNRFSGSKSGNTASLTISGLQAEDEADYYCCSYAGSYSYVVFGGGTKLTVL

SEQ ID NO: 12 - protein, 124 aa, Artificial Sequence
  Description of Artificial Sequence: Synthetic polypeptide
EVQLLESGGGLVQPGGSLRLSCAASGFTFSNYAMSWVRQAPGKGLEWVSDISGSGGSTYYADSVKGRFTISRDNSKNTLYLQMNSLRAEDTAVYYCVKGTIPIFGVIRSAFDYWGQGTLVTVSS

SEQ ID NO: 13 - protein, 108 aa, Artificial Sequence
  Description of Artificial Sequence: Synthetic polypeptide
DIQMTQSPSSLSASVGDRVTITCRASQSIHTYLNWYQQKPGKAPKLLIYAASALASGVPSRFSGSGSGTDFTLTISSLQPEDFATYYCQQSYSAPPYTFGQGTKVEIK

SEQ ID NO: 14 - protein, 122 aa, Artificial Sequence
  Description of Artificial Sequence: Synthetic polypeptide
EVQLLESGGGLVQPGGSLRLSCAASGFTFSDFAMAWVRQAPGKGLEWVSAISGSGDITYYADSVKGRFTISRDNSKNTLYLQMNSLRAEDTAVYYCAREADGLHSPWHFDLWGQGTLVTVSS

SEQ ID NO: 15 - protein, 115 aa, Artificial Sequence
  Description of Artificial Sequence: Synthetic polypeptide
EVQLVESGGGLVQPGGSLRLSCAASGFNVNDYAMGWFRQAPGKEREFVAGITSSVGVTNYADSVKGRFTISADNSKNTAYLQMNSLKPEDTAVYYCAADIFFVNWGRGTLVTVSS

SEQ ID NO: 16 - protein, 9 aa, Artificial Sequence
  Description of Artificial Sequence: Synthetic peptide
FTFSNYPMN

SEQ ID NO: 17 - protein, 13 aa, Artificial Sequence
  Description of Artificial Sequence: Synthetic peptide
STISGSGGNTFYA

SEQ ID NO: 18 - protein, 12 aa, Artificial Sequence
  Description of Artificial Sequence: Synthetic peptide
CVRHDEYSFDYW

SEQ ID NO: 19 - protein, 9 aa, Artificial Sequence
  Description of Artificial Sequence: Synthetic peptide
ITFSSYAMS

SEQ ID NO: 20 - protein, 13 aa, Artificial Sequence
  Description of Artificial Sequence: Synthetic peptide
SGISGSGGSTYYA

SEQ ID NO: 21 - protein, 22 aa, Artificial Sequence
  Description of Artificial Sequence: Synthetic peptide
CAKHGSGTIFGVVIAKYYFDYW

SEQ ID NO: 22 - protein, 9 aa, Artificial Sequence
  Description of Artificial Sequence: Synthetic peptide
FTFSRHAMN

SEQ ID NO: 23 - protein, 13 aa, Artificial Sequence
  Description of Artificial Sequence: Synthetic peptide
SGITGSGDETYYA

SEQ ID NO: 24 - protein, 24 aa, Artificial Sequence
  Description of Artificial Sequence: Synthetic peptide
CARDLPASYYDSSGYYWHNGMDVW

SEQ ID NO: 25 - protein, 9 aa, Artificial Sequence
  Description of Artificial Sequence: Synthetic peptide
FTFSRHAMN

SEQ ID NO: 26 - protein, 13 aa, Artificial Sequence
  Description of Artificial Sequence: Synthetic peptide
SGISGSGDETYYA

SEQ ID NO: 27 - protein, 24 aa, Artificial Sequence
  Description of Artificial Sequence: Synthetic peptide
CARDLPASYYDSSGYYWHNGMDVW

SEQ ID NO: 28 - protein, 9 aa, Artificial Sequence
  Description of Artificial Sequence: Synthetic peptide
FMFSSYAMS

SEQ ID NO: 29 - protein, 13 aa, Artificial Sequence
  Description of Artificial Sequence: Synthetic peptide
SAISGSGGSTYYT

SEQ ID NO: 30 - protein, 17 aa, Artificial Sequence
  Description of Artificial Sequence: Synthetic peptide
CAKDGASGWPNWHFDLW

SEQ ID NO: 31 - protein, 9 aa, Artificial Sequence
  Description of Artificial Sequence: Synthetic peptide
FTFSNYAMS

SEQ ID NO: 32 - protein, 13 aa, Artificial Sequence
  Description of Artificial Sequence: Synthetic peptide
SDISGSGGSTYYA

SEQ ID NO: 33 - protein, 19 aa, Artificial Sequence
  Description of Artificial Sequence: Synthetic peptide
CVKGTIPIFGVIRSAFDYW

SEQ ID NO: 34 - protein, 9 aa, Artificial Sequence
  Description of Artificial Sequence: Synthetic peptide
FTFSDFAMA

SEQ ID NO: 35 - protein, 13 aa, Artificial Sequence
  Description of Artificial Sequence: Synthetic peptide
SAISGSGDITYYA

SEQ ID NO: 36 - protein, 17 aa, Artificial Sequence
  Description of Artificial Sequence: Synthetic peptide
CAREADGLHSPWHFDLW

SEQ ID NO: 37 - protein, 9 aa, Artificial Sequence
  Description of Artificial Sequence: Synthetic peptide
FNVNDYAMG

SEQ ID NO: 38 - protein, 13 aa, Artificial Sequence
  Description of Artificial Sequence: Synthetic peptide
AGITSSVGVTNYA

SEQ ID NO: 39 - protein, 10 aa, Artificial Sequence
  Description of Artificial Sequence: Synthetic peptide
CAADIFFVNW

SEQ ID NO: 40 - protein, 11 aa, Artificial Sequence
  Description of Artificial Sequence: Synthetic peptide
RASQSIGNYLN

SEQ ID NO: 41 - protein, 7 aa, Artificial Sequence
  Description of Artificial Sequence: Synthetic peptide
GVSSLQS

SEQ ID NO: 42 - protein, 11 aa, Artificial Sequence [sequence omitted]

SEQ ID NO: 43 - protein, 14 aa, Artificial Sequence
  Description of Artificial Sequence: Synthetic peptide
TGTSSDVGHYNLVS

SEQ ID NO: 44 - protein, 7 aa, Artificial Sequence
  Description of Artificial Sequence: Synthetic peptide
EGTKRPS

SEQ ID NO: 45 - protein, 13 aa, Artificial Sequence [sequence omitted]

SEQ ID NO: 46 - protein, 11 aa, Artificial Sequence
  Description of Artificial Sequence: Synthetic peptide
RASQTINTFLN

SEQ ID NO: 47 - protein, 7 aa, Artificial Sequence
  Description of Artificial Sequence: Synthetic peptide
SASTLQS

SEQ ID NO: 48 - protein, 10 aa, Artificial Sequence [sequence omitted]

SEQ ID NO: 49 - protein, 11 aa, Artificial Sequence
  Description of Artificial Sequence: Synthetic peptide
RASQTINTYLN

SEQ ID NO: 50 - protein, 7 aa, Artificial Sequence
  Description of Artificial Sequence: Synthetic peptide
SASTLQS

SEQ ID NO: 51 - protein, 10 aa, Artificial Sequence [sequence omitted]

SEQ ID NO: 52 - protein, 14 aa, Artificial Sequence
  Description of Artificial Sequence: Synthetic peptide
TGTSSDVGSYYLVS

SEQ ID NO: 53 - protein, 7 aa, Artificial Sequence
  Description of Artificial Sequence: Synthetic peptide
EGDKRPS

SEQ ID NO: 54 - protein, 12 aa, Artificial Sequence
  Description of Artificial Sequence: Synthetic peptide
CCSHAGRYPYVF

SEQ ID NO: 55 - protein, 14 aa, Artificial Sequence
  Description of Artificial Sequence: Synthetic peptide
TGTSSDVGSYSLVS

SEQ ID NO: 56 - protein, 7 aa, Artificial Sequence
  Description of Artificial Sequence: Synthetic peptide
EGTKRPS

SEQ ID NO: 57 - protein, 13 aa, Artificial Sequence [sequence omitted]

SEQ ID NO: 58 - protein, 11 aa, Artificial Sequence
  Description of Artificial Sequence: Synthetic peptide
RASQSIHTYLN

SEQ ID NO: 59 - protein, 7 aa, Artificial Sequence
  Description of Artificial Sequence: Synthetic peptide
AASALAS

SEQ ID NO: 60 - protein, 12 aa, Artificial Sequence [sequence omitted]

SEQ ID NO: 61 - protein, 128 aa, Artificial Sequence
  Description of Artificial Sequence: Synthetic polypeptide
EVQLVESGGGLVQPGGSLRLSCAASGFTLDYYAMGWFRQAPGKEREFVAAINWSGDNTHYADSVKGRFTISADNSKNTAYLQMNSLKPEDTAVYYCARAPFYCTTTKCQDNYYYMDVWGQGTLVTVSS

SEQ ID NO: 62 - protein, 117 aa, Artificial Sequence
  Description of Artificial Sequence: Synthetic polypeptide
EVQLVESGGGLVQPGGSLRLSCAASGGTFSSIGMGWFRQAPGKEREFVAAISWDGGATAYADSVKGRFTISADNSKNTAYLQMNSLKPEDTAVYYCAKEDVGKPFDWGQGTLVTVSS

SEQ ID NO: 63 - protein, 121 aa, Artificial Sequence
  Description of Artificial Sequence: Synthetic polypeptide
EVQLVESGGGLVQPGGSLRLSCAASGFTLGDYVMGWFRQAPGKEREFVAAIHSGGSTYADSVKGRFTISADNSKNTAYLQMNSLKPEDTAVYYCAAKEYGGTRRYDRAYNWGQGTLVTVSS

SEQ ID NO: 64 - protein, 115 aa, Artificial Sequence
  Description of Artificial Sequence: Synthetic polypeptide
EVQLVESGGGLVQPGGSLRLSCAASGGGTFGSYAMGWFRQAPGKERELVAAISSGGSTNYADSVKGRFTISADNSKNTAYLQMNSLKPEDTAVYYCARGDWRYGWGQGTLVTVSS

SEQ ID NO: 65 - protein, 124 aa, Artificial Sequence
  Description of Artificial Sequence: Synthetic polypeptide
EVQLVESGGGLVQPGGSLRLSCAASGRTYSISAMGWFRQAPGKEREFVAAISMSGDDSAYADSVKGRFTISADNSKNTAYLQMNSLKPEDTAVYYCAAQLGYESGYSLTYDYDWGQGTLVTVSS

SEQ ID NO: 66 - protein, 123 aa, Artificial Sequence
  Description of Artificial Sequence: Synthetic polypeptide
EVQLVESGGGLVQPGGSLRLSCAASGGTFSTYPMGWFRQAPGKEREFVAAITSDGSTLYADSVKGRFTISADNSKNTAYLQMNSLKPEDTAVYYCAATDYNKAYAREGRRYDWGQGTLVTVSS

SEQ ID NO: 67 - protein, 123 aa, Artificial Sequence
  Description of Artificial Sequence: Synthetic polypeptide
EVQLVESGGGLVQPGGSLRLSCAASGSIFRINAMGWFRQAPGKEREFVAAIHWSGSSTRYADSVKGRFTISADNSKNTAYLQMNSLKPEDTAVYYCAAQDRRRGDYYTFDYHWGQGTLVTVSS

SEQ ID NO: 68 - protein, 114 aa, Artificial Sequence
  Description of Artificial Sequence: Synthetic polypeptide
EVQLVESGGGLVQPGGSLRLSCAASGGTFNNYAMGWFRQAPGKERELVAAITSGGSTDYADSVKGRFTISADNSKNTAYLQMNSLKPEDTAVYYCARGDWRYGWGQGTLVTVSS

SEQ ID NO: 69 - protein, 116 aa, Artificial Sequence
  Description of Artificial Sequence: Synthetic polypeptide
EVQLVESGGGLVQPGGSLRLSCAASGTIVNINVMGWFRQAPGKEREFVAAIHWSGGLKAYADSVKGRFTISADNSKNTAYLQMNSLKPEDTAVYYCAMNRAGIYEWGQGTLVTVSS

SEQ ID NO: 70 - protein, 114 aa, Artificial Sequence
  Description of Artificial Sequence: Synthetic polypeptide
EVQLVESGGGLVQPGGSLRLSCAASGSTFSNYAMGWFRQAPGKERELVAAITSGGSTSYADSVKGRFTISADNSKNTAYLQMNSLKPEDTAVYYCARGDWRYGWGQGTLVTVSS

SEQ ID NO: 71 - protein, 123 aa, Artificial Sequence
  Description of Artificial Sequence: Synthetic polypeptide
EVQLVESGGGLVQPGGSLRLSCAASGFSFDDYVMGWFRQAPGKEREFVAAISRSGNLKSYADSVKGRFTISADNSKNTAYLQMNSLKPEDTAVYYCAAKEYGGTRRYDRAYNWGQGTLVTVSS

SEQ ID NO: 72 - protein, 115 aa, Artificial Sequence
  Description of Artificial Sequence: Synthetic polypeptide
EVQLVESGGGLVQPGGSLRLSCAASGSAFRSTVMGWFRQAPGKEREFVAAVIGSSGITDYADSVKGRFTISADNSKNTAYLQMNSLKPEDTAVYYCARGDWRYGWGQGTLVTVSS

SEQ ID NO: 73 - protein, 116 aa, Artificial Sequence
  Description of Artificial Sequence: Synthetic polypeptide
EVQLVESGGGLVQPGGSLRLSCAASGRTFSDAGMGWFRQAPGKEREFVAAISRSGNLKAYADSVKGRFTISADNSKNTAYLQMNSLKPEDTAVYYCAVQVNGTWAWGQGTLVTVSS

SEQ ID NO: 74 - protein, 115 aa, Artificial Sequence
  Description of Artificial Sequence: Synthetic polypeptide
EVQLVESGGGLVQPGGSLRLSCAASGFTLDYYAMGWFRQAPGKERELVAAISWNGGSTSYADSVKGRFTISADNSKNTAYLQMNSLKPEDTAVYYCARGDWRYGWGQGTLVTVSS

SEQ ID NO: 75 - protein, 120 aa, Artificial Sequence
  Description of Artificial Sequence: Synthetic polypeptide
EVQLVESGGGLVQPGGSLRLSCAASGGTFSTYVMGWFRQAPGKEREFVAAISWSGESTLYADSVKGRFTISADNSKNTAYLQMNSLKPEDTAVYYCAADLMYGVDRRYDWGQGTLVTVSS

SEQ ID NO: 76 - protein, 114 aa, Artificial Sequence
  Description of Artificial Sequence: Synthetic polypeptide
EVQLVESGGGLVQPGGSLRLSCAASGISSSKRNMGWFRQAPGKEREFVAGISWTGGITYYADSVKGRFTISADNSKNTAYLQMNSLKPEDTAVYYCAIAGRGRWGQGTLVTVSS

SEQ ID NO: 77 - protein, 122 aa, Artificial Sequence
  Description of Artificial Sequence: Synthetic polypeptide
EVQLVESGGGLVQPGGSLRLSCAASGRRFSAYGMGWFRQAPGKEREFVAVISRSGTLTRYADSVKGRFTISADNSKNTAYLQMNSLKPEDTAVYYCASSGPADARNGERWHWGQGTLVTVSS

SEQ ID NO: 78 - protein, 123 aa, Artificial Sequence
  Description of Artificial Sequence: Synthetic polypeptide
EVQLVESGGGLVQPGGSLRLSCAASGLTFSSFVMGWFRQAPGKEREFVAAISSNGGSTRYADSVKGRFTISADNSKNTAYLQMNSLKPEDTAVYYCAAKEYGGTRRYDRAYNWGQGTLVTVSS

SEQ ID NO: 79 - protein, 124 aa, Artificial Sequence
  Description of Artificial Sequence: Synthetic polypeptide
EVQLVESGGGLVQPGGSLRLSCAASGTVFSISAMGWFRQAPGKEREFVAAISMSGDDTAYADSVKGRFTISADNSKNTAYLQMNSLKPEDTAVYYCAAQLGYESGYSLTYDYDWGQGTLVTVSS

SEQ ID NO: 80 - protein, 117 aa, Artificial Sequence
  Description of Artificial Sequence: Synthetic polypeptide
EVQLVESGGGLVQPGGSLRLSCAASGSIFSPNVMGWFRQAPGKEREFVAAITNGGSTKYADSVKGRFTISADNSKNTAYLQMNSLKPEDTAVYYCAAQRWRGGSYEWGQGTLVTVSS

SEQ ID NO: 81 - protein, 123 aa, Artificial Sequence
  Description of Artificial Sequence: Synthetic polypeptide
EVQLVESGGGLVQPGGSLRLSCAASGIPASIRVMGWFRQAPGKEREFVAAIHWSGSSTRYADSVKGRFTISADNSKNTAYLQMNSLKPEDTAVYYCALSRAIVPGDSEYDYRWGQGTLVTVSS

SEQ ID NO: 82 - protein, 124 aa, Artificial Sequence
  Description of Artificial Sequence: Synthetic polypeptide
EVQLVESGGGLVQPGGSLRLSCAASGRTFSMSAMGWFRQAPGKEREFVSAISWSGGSTLYADSVKGRFTISADNSKNTAYLQMNSLKPEDTAVYYCAAQLGYESGYSLTYDYDWGQGTLVTVSS

SEQ ID NO: 83 - protein, 114 aa, Artificial Sequence
  Description of Artificial Sequence: Synthetic polypeptide
EVQLVESGGGLVQPGGSLRLSCAASGRTFSNYAMGWFRQAPGKERELVAAITSGGSTDYADSVKGRFTISADNSKNTAYLQMNSLKPEDTAVYYCARGDWRYGWGQGTLVTVSS

SEQ ID NO: 84 - protein, 114 aa, Artificial Sequence
  Description of Artificial Sequence: Synthetic polypeptide
EVQLVESGGGLVQPGGSLRLSCAASGRTFSSYAMGWFRQAPGKERELVAAISTGGSTYYADSVKGRFTISADNSKNTAYLQMNSLKPEDTAVYYCARGDWRYGWGQGTLVTVSS

SEQ ID NO: 85 - protein, 122 aa, Artificial Sequence
  Description of Artificial Sequence: Synthetic polypeptide
EVQLVESGGGLVQPGGSLRLSCAASGRSFSSVGMGWFRQAPGKEREFVAVISRSGASTAYADSVKGRFTISADNSKNTAYLQMNSLKPEDTAVYYCASAGPADARNGERWAWGQGTLVTVSS

SEQ ID NO: 86 - protein, 117 aa, Artificial Sequence
  Description of Artificial Sequence: Synthetic polypeptide
EVQLVESGGGLVQPGGSLRLSCAASGRAFRRYTMGWFRQAPGKERELIAVINWSGDRRYYADSVKGRFTISADNSKNTAYLQMNSLKPEDTAVYYCAATLAKGGGRWGQGTLVTVSS

SEQ ID NO: 87 - protein, 121 aa, Artificial Sequence
  Description of Artificial Sequence: Synthetic polypeptide
EVQLVESGGGLVQPGGSLRLSCAAMAWAGFARRRAKNAKWWRALPRGGPTYADSVKGRFTISADNSKNTAYLQMNSLKPEDTAVYYCAAGGMWYGSSLYVRFDLLEDGMDWGQGTLVTVSS

SEQ ID NO: 88 - protein, 122 aa, Artificial Sequence
  Description of Artificial Sequence: Synthetic polypeptide
EVQLVESGGGLVQPGGSLRLSCAASGSISSINGMGWFRQAPGKERELVALISRSGGTTYYADSVKGRFTISADNSKNTAYLQMNSLKPEDTAVYYCASAGPADARNGERWAWGQGTLVTVSS

SEQ ID NO: 89 - protein, 114 aa, Artificial Sequence
  Description of Artificial Sequence: Synthetic polypeptide
EVQLVESGGGLVQPGGSLRLSCAASGRTFSNNVMGWFRQAPGKERELVAAAISGGSTYYADSVKGRFTISADNSKNTAYLQMNSLKPEDTAVYYCARGDWRYGWGQGTLVTVSS

SEQ ID NO: 90 - protein, 123 aa, Artificial Sequence
  Description of Artificial Sequence: Synthetic polypeptide
EVQLVESGGGLVQPGGSLRLSCAASGRTFSISAMGWFRQAPGKEREFVAAISRSGTTMYADSVKGRFTISADNSKNTAYLQMNSLKPEDTAVYYCAAQLGYESGYSLTYDYDWGQGTLVTVSS

SEQ ID NO: 91 - protein, 125 aa, Artificial Sequence
  Description of Artificial Sequence: Synthetic polypeptide
EVQLVESGGGLVQPGGSLRLSCAASGGTFSYYDLAAMGWFRQAPGKEREFVAAISWSQYNTKYADSVKGRFTISADNSKNTAYLQMNSLKPEDTAVYYCAARVVVRTAHGFEDNWGQGTLVTVSS

SEQ ID NO: 92 - protein, 119 aa, Artificial Sequence
  Description of Artificial Sequence: Synthetic polypeptide
EVQLVESGGGLVQPGGSLRLSCAASGRTFNNYGMGWFRQAPGKEREFVAVISRSGSLKAYADSVKGRFTISADNSKNTAYLQMNSLKPEDTAVYYCASDPTYGSGRWTWGQGTLVTVSS

SEQ ID NO: 93 - protein, 123 aa, Artificial Sequence
  Description of Artificial Sequence: Synthetic polypeptide
EVQLVESGGGLVQPGGSLRLNCAASGFTLDDYVMGWFRQTPGKEREFVAAISSSGALTSYADSVKGRFTISADNSKNTAYLQMNSLKPEDAAVYYCAAKEYGGTRRYDRAYNWGQGTLVTVSS

SEQ ID NO: 94 - protein, 121 aa, Artificial Sequence
  Description of Artificial Sequence: Synthetic polypeptide
EVQLVESGGGLVQPGGSLRLSCAASGRTFNAMGWFRQAPGKEREFVAAIRWSGDMSVYADSVKGRFTISADNSKNTAYLQMNSLKPEDTAVYYCAAQDRRRGDYYTFDYHWGQGTLVTVSS

SEQ ID NO: 95 - protein, 114 aa, Artificial Sequence
  Description of Artificial Sequence: Synthetic polypeptide
EVQLVESGGGLVQPGGSLRLSCAASGLTFSTYAMGWFRQAPGKEREFVAAITSGGSTDYADSVKGRFTISADNSKNTAYLQMNSLKPEDTAVYYCARGDWRYGWGQGTLVTVSS

SEQ ID NO: 96 - protein, 114 aa, Artificial Sequence
  Description of Artificial Sequence: Synthetic polypeptide
EVQLVESGGGLVQPGGSLRLSCAASGSIFTINAMGWFRQAPGKEREGVAAIGSDGSTSYADSVKGRFTISADNSKNTAYLQMNSLKPEDTAVYYCAVVRWGADWGQGTLVTVSS

SEQ ID NO: 97 - protein, 116 aa, Artificial Sequence
  Description of Artificial Sequence: Synthetic polypeptide
EVQLVESGGGLVQPGGSLRLSCAASGLTFSSYAMGWFRQAPGKERELVAAITSSSGSTPAYADSVKGRFTISADNSKNTAYLQMNSLKPEDTAVYYCARGDWRYGWGQGTLVTVSS

SEQ ID NO: 98 - protein, 123 aa, Artificial Sequence
  Description of Artificial Sequence: Synthetic polypeptide
EVQLVESGGGLVQPGGSLRLSCAASGIPFSTRTMGWFRQAPGKEREFVAAISWSQYNTKYADSVKGRFTISADNSKNTAYLQMNSLKPEDTAVYYCAARHWGMFSRSENDYNWGQGTLVTVSS

SEQ ID NO: 99 - protein, 125 aa, Artificial Sequence
  Description of Artificial Sequence: Synthetic polypeptide
EVQLVESGGGLVQPGGSLRLSCAASGRSRFSTYVMGWFRQAPGKEREFVAAISWSQYNTKYADSVKGRFTISADNSKNTAYLQMNSLKPEDTAVYYCAAGNGGRNYGHSRARYDWGQGTLVTVSS

SEQ ID NO: 100 - protein, 118 aa, Artificial Sequence
  Description of Artificial Sequence: Synthetic polypeptide
EVQLVESGGGLVQPGGSLRLSCAASGLTLSSYGMGWFRQAPGKEREYVAVISRSGSLKAYADSVKGRFTISADNSKNTAYLQMNSLKPEDTAVYYCATRADAEGWWDWGQGTLVTVSS

SEQ ID NO: 101 - protein, 113 aa, Artificial Sequence
  Description of Artificial Sequence: Synthetic polypeptide
EVQLVESGGGLVQPGGSLRLSCAASGSIFRVNVMGWFRQAPGKEREFVAAINNFGTTKYADSVKGRFTISADNSKNTAYLQMNSLKPEDTAVYYCAADLPSRWGQGTLVTVSS

SEQ ID NO: 102 - protein, 114 aa, Artificial Sequence
  Description of Artificial Sequence: Synthetic polypeptide
EVQLVESGGGLVQPGGSLRLSCAASGRTFRNYAMGWFRQAPGKERELVAAISSGGSTDYADSVKGRFTISADNSKNTAYLQMNSLKPEDTAVYYCARGDWRYGWGQGTLVTVSS

SEQ ID NO: 103 - protein, 114 aa, Artificial Sequence
  Description of Artificial Sequence: Synthetic polypeptide
EVQLVESGGGLVQPGGSLRLSCAASGRTFSSFAMGWFRQAPGKERELVAAISSGGSTNYADSVKGRFTISADNSKNTAYLQMNSLKPEDTAVYYCARGDWRYGWGQGTLVTVSS

SEQ ID NO: 104 - protein, 123 aa, Artificial Sequence
  Description of Artificial Sequence: Synthetic polypeptide
EVQLVESGGGLVQPGGSLRLSCAASGTTFRINAMGWFRQAPGKEREFVAAMNWSGGSTKYADSVKGRFTISADNSKNTAYLQMNSLKPEDTAVYYCAAQDRRRGDYYTFDYHWGQGTLVTVSS

SEQ ID NO: 105 - protein, 122 aa, Artificial Sequence
  Description of Artificial Sequence: Synthetic polypeptide
EVQLVESGGGLVQPGGSLRLSCAASGFTLGDYVMGWFRQAPGKEREFVAAIHSGGSTLYADSVKGRFTISADNSKNTAYLQMNSLKPEDTAVYYCAAKEYGGTRRYDRTYNWGQGTLVTVSS

SEQ ID NO: 106 - protein, 112 aa, Artificial Sequence
  Description of Artificial Sequence: Synthetic polypeptide
EVQLVESGGGLVQPGGSLRLSCAASGFTFSRSAMGWFRQAPGKERELVAGILSSGATVYADSVKGRFTISADNSKNTAYLQMNSLKPEDTAVYYCAKAPRDWGQGTLVTVSS

SEQ ID NO: 107 - protein, 114 aa, Artificial Sequence
  Description of Artificial Sequence: Synthetic polypeptide
EVQLVESGGGLVQPGGSLRLSCAASGRTFNNYAMGWFRQAPGKERELVAAITSGGSTDYADSVKGRFTISADNSKNTAYLQMNSLKPEDTAVYYCARGDWRYGWGQGTLVTVSS

SEQ ID NO: 108 - protein, 116 aa, Artificial Sequence
  Description of Artificial Sequence: Synthetic polypeptide
EVQLVESGGGLVQPGGSLRLSCAASGFTFRSYPMGWFRQAPGKEREFVAAINNFGTTKYADSVKGRFTISADNSKNTAYLQMNSLKPEDTAVYYCAAAKGIGVYGWGQGTLVTVSS

SEQ ID NO: 109 - protein, 121 aa, Artificial Sequence
  Description of Artificial Sequence: Synthetic polypeptide
EVQLVESGGGLVQPGGSLRLSCAASGNIFTRNVMGWFRQAPGKEREFVAAIHWNGDSTKYADSVKGRFTISADNSKNTAYLQMNSLKPEDTAVYYCAAGSNIGGSRWRYDWGQGTLVTVSS

SEQ ID NO: 110 - protein, 123 aa, Artificial Sequence
  Description of Artificial Sequence: Synthetic polypeptide
EVQLVESGGGLVQPGGSLRLSCAASGRTISRYTMGWFRQAPGKERELVAAIKWSGASTVYADSVKGRFTISADNSKNTAYLQMNSLKPEDTAVYYCAAKGIWDYLGRRDFGDWGQGTLVTVSS

SEQ ID NO: 111 - protein, 124 aa, Artificial Sequence
  Description of Artificial Sequence: Synthetic polypeptide
EVQLVESGGGLVQPGGSLRLSCAASGFRFSSYGMGWFRQAPGKEREFVAIITSGGLTVYADSVKGRFTISADNSKNTAYLQMNSLKPEDTAVYYCAARKTFYFGTSSYPNDYAWGQGTLVTVSS

SEQ ID NO: 112 - protein, 114 aa, Artificial Sequence
  Description of Artificial Sequence: Synthetic polypeptide
EVQLVESGGGLVQPGGSLRLSCAASGRTFDNHAMGWFRQAPGKEREGVAAIGSDGSTSYADSVKGRFTISADNSKNTAYLQMNSLKPEDTAVYYCAVVRWGVDWGQGTLVTVSS

SEQ ID NO: 113 - protein, 115 aa, Artificial Sequence
  Description of Artificial Sequence: Synthetic polypeptide
EVQLVESGGGLVQPGGSLRLSCAASGFTFSSHAMGWFRQAPGKEREFVAGISWSGESTLTRYADSVKGRFTISADNSKNTAYLQMNSLKPEDTAVYYCADVNGDWGQGTLVTVSS

SEQ ID NO: 114 - protein, 124 aa, Artificial Sequence
  Description of Artificial Sequence: Synthetic polypeptide
EVQLVESGGGLVQPGGSLRLSCAASGMTFRLYAMGWFRQAPGKEREFVAAISWSQYNTKYADSVKGRFTISADNSKNTAYLQMNSLKPEDTAVYYCAAQLGYESGYSLTYDYDWGQGTLVTVSS

SEQ ID NO: 115 - protein, 115 aa, Artificial Sequence
  Description of Artificial Sequence: Synthetic polypeptide
EVQLVESGGGLVQPGGSLRLSCAASGGTFRKLAMGWFRQAPGKEREFVAVISWTGGSSYYADSVKGRFTISADNSKNTAYLQMNSLKPEDTAVYYCARLTSFATWGQGTLVTVSS

SEQ ID NO: 116 - protein, 118 aa, Artificial Sequence
  Description of Artificial Sequence: Synthetic polypeptide
EVQLVESGGGLVQPGGSLRLSCAASGRTFSANGMGWFRQAPGKEREFVAAISASGTLRAYADSVKGRFTISADNSKNTAYLQMNSLKPEDTAVYYCAARSPMSPTWDWGQGTLVTVSS

SEQ ID NO: 117 - protein, 121 aa, Artificial Sequence
  Description of Artificial Sequence: Synthetic polypeptide
EVQLVESGGGLVQPGGSLRLSCAASGSAFRSTVMGWFRQAPGKEREFVAAISWTGESTLYADSVKGRFTISADNSKNTAYLQMNSLKPEDTAVYYCATGPYRSYFARSYLWGQGTLVTVSS

SEQ ID NO: 118 - protein, 117 aa, Artificial Sequence
  Description of Artificial Sequence: Synthetic polypeptide
EVQLVESGGGLVQPGGSLRLSCAASGGTFDYSGMGWFRQAPGKEREFVAVVSQSGRTTYYADSVKGLFTITADNSKNTAYLQMNLLKPEDTAVYYCPTATRPGEWDGGQGTLVTVSR

SEQ ID NO: 119 - protein, 111 aa, Artificial Sequence
  Description of Artificial Sequence: Synthetic polypeptide
EVQLVESGGGLVQPGGSLRLSCAASGVFGPIRAMGWFRQAPGKERELVALMGNDGSTYADSVKGRFTISADNSKNTAYLQMNSLKPEDTAVYYCAAIGWRWGQGTLVTVSS

SEQ ID NO: 120 - protein, 121 aa, Artificial Sequence
  Description of Artificial Sequence: Synthetic polypeptide
EVQLVESGGGLVQPGGSLRLSCAASGFNFNWYPMGWFRQAPGKEREFVAAIRWSGGITYYADSVKGRFTISADNSKNTAYLQMNSLKPEDTAVYYCATGPYRSYFARSYLWGQGTLVTVSS

SEQ ID NO: 121 - protein, 112 aa, Artificial Sequence
  Description of Artificial Sequence: Synthetic polypeptide
EVQLVESGGGLVQPGGSLRLSCAASGMTFHRYVMGWFRQAPGKERELVASITTGGTPNYADSVKGRFTIITDNNKNTAYLLMINLQPEDTAVYYCCKVPYIWGQGTLGTVGT

SEQ ID NO: 122 - protein, 113 aa, Artificial Sequence
  Description of Artificial Sequence: Synthetic polypeptide
EVQLVESGGGLVQPGGSLRLSCAASGISTMGWFRQAPGKEREFVAAINNFGTTKYADSVKGRFTISADNSKNTAYLQMNSLKPEDTAVYYCAAASQSGSGYDWGQGTLVTVSS

SEQ ID NO: 123 - protein, 111 aa, Artificial Sequence
  Description of Artificial Sequence: Synthetic polypeptide
EVQLVESGGGLVQPGGSLRLSCAASGRAFNTRAMGWFRQAPGKERELVALMGNDGSTYADSVKGRFTISADNSKNTAYLQMNSLKPEDTAVYYCAAIGWRWGQGTLVTVSS

SEQ ID NO: 124 - protein, 123 aa, Artificial Sequence
  Description of Artificial Sequence: Synthetic polypeptide
EVQLVESGGGLVQPGGSLRLSCAASGLTDRRYTMGWFRQAPGKEREFVAAINSGGSTLYADSVKGRFTISADNSKNTAYLQMNSLKPEDTAVYYCAAGNGGRTYGHSRARYEWGQGTLVTVSS

SEQ ID NO: 125 - protein, 111 aa, Artificial Sequence
  Description of Artificial Sequence: Synthetic polypeptide
EVQLVESGGGLVQPGGSLRLSCAASGRTFNVMGWFRQAPGKERELVALMGNDGSTYADSVKGRFTISADNSKNTAYLQMNSLKPEDTAVYYCAAVRWGVDWGQGTLVTVSS

SEQ ID NO: 126 - protein, 112 aa, Artificial Sequence
  Description of Artificial Sequence: Synthetic polypeptide
EVQLVESGGGLVQPGGSLRLSCAASGRAFNTRAMGWFRQAPGKERELVALMGNDGSTNYADSVKGRFTISADNSKNTAYLQMNSLKPEDTAVYYCAAIGWRWGQGTLVTVSS

SEQ ID NO: 127 - protein, 117 aa, Artificial Sequence
  Description of Artificial Sequence: Synthetic polypeptide
EVQVVESGGGVVHPGGSVRMRCAASGVTVDYSGMGWFGQAPGKEREFVAVVSQSARTTYYADSVKGRFTISADNSKNTEYLQMNSMKPEDTAVYYCATATRPGEWDWGQGTLVTVSS

SEQ ID NO: 128 - protein, 124 aa, Artificial Sequence
  Description of Artificial Sequence: Synthetic polypeptide
EVQLVESGGGLVQPGGSLRLSCAASGRTPRLGAMGWFRQAPGKEREFVAAISRSGGLTSYADSVKGRFTISADNSKNTAYLQMNSLKPEDTAVYYCAAQLVGSNIGGSRWRYDWGQGTLVTVSS

SEQ ID NO: 129 - protein, 114 aa, Artificial Sequence
  Description of Artificial Sequence: Synthetic polypeptide
EVQLVESGGGLVQPGGSLRLSCAASGLTFRNYAMGWFRQAPGKEREFVAAITSGGSTLYADSVKGRFTISADNSKNTAYLQMNSLKPEDTAVYYCARGDWRYGWGHGTLVTESS

SEQ ID NO: 130 - protein, 114 aa, Artificial Sequence
  Description of Artificial Sequence: Synthetic polypeptide
EVQLVESGGGLVQPGGSLRLSCAASGGRTFSDLAMGWFRQAPGKEREFVALITRSGGTTFYADSVKGRFTISADNSKNTAYLQMNSLKPEDTAVYYCAIGRGSWGQGTLVTVSS

SEQ ID NO: 131 - protein, 117 aa, Artificial Sequence
  Description of Artificial Sequence: Synthetic polypeptide
EVQLVESGGGLVQPGGSLRLSCAASGFTFGEYAMGWFRQAPGKEREFVAAVSSLGPFTRYADSVKGRFTISADNSKNTAYLQMNSLKPEDTAVYYCAAVLDGYSGSWGQGTLVTVSS

SEQ ID NO: 132 - protein, 124 aa, Artificial Sequence
  Description of Artificial Sequence: Synthetic polypeptide
EVQLVESGGGLVQPGGSLRLSCAASGFAFSSYGMGWFRQAPGKEREFVAAISWSGVRSGVSAIYADSVKGRFTISADNSKNTAYLQMNSLKPEDTAVYYCTTDLTGDLWYFDLWGQGTLVTVSS

SEQ ID NO: 133 - protein, 119 aa, Artificial Sequence
  Description of Artificial Sequence: Synthetic polypeptide
EVQLVESGGGLVQPGGSLRLSCAASGLTAGTYAMCWFRQAPGKEREGVACASSTDGSTAYADSVKGRFTISADNSKNTAYLQMNSLKPEDTAVYYCAAVRTYGSATYDWGQGTLVTVSS

SEQ ID NO: 134 - protein, 123 aa, Artificial Sequence
  Description of Artificial Sequence: Synthetic polypeptide
EVQLVESGGGLVQPGGSLRLSCAASGFTLDDYVMGWFRQAPGKERELVAAVSSLGPFTRYADSVKGRFTISADNSKNTAYLQMNSLKPEDTAVYYCAAKEYGGTRRYDRAYNWGQGTLVTVSS

SEQ ID NO: 135 - protein, 118 aa, Artificial Sequence
  Description of Artificial Sequence: Synthetic polypeptide
EVQLVESGGGLVQPGGSLRLSCAASGPTLGSYVMGWFRQAPGKEREFVAAISWSQYNTKYADSVKGRFTISADNSKNTAYLQMNSLKPEDTAVYYCAAQRWRGGSYEWGQGTLVTVSS

SEQ ID NO: 136 - protein, 118 aa, Artificial Sequence
  Description of Artificial Sequence: Synthetic polypeptide
EVQLVESGGGLVQPGGSLRLSCAASGPTFSSYVMGWFRQAPGKEREFVAAISWSQYNTKYADSVKGRFTISADNSKNTAYLQMNSLKPEDTAVYYCAAASRSGSGYDWGQGTLVTVSS

SEQ ID NO: 137 - protein, 120 aa, Artificial Sequence
  Description of Artificial Sequence: Synthetic polypeptide
EVQLVESGGGLVQPGGSLRLSCAASGYLYSKDCMGWFRQAPGKEREGVATICTGDGSTAYADSVKGRFTISADNSKNTAYLQMNSLKPEDTAVYYCAVIAYEEGVYRWDWGQGTLVTVSS

SEQ ID NO: 138 - protein, 117 aa, Artificial Sequence
  Description of Artificial Sequence: Synthetic polypeptide
EVQLVESGGGLVQPGGSLRLSCAASGFTIDDYAMGWFRQAPGKEREGVAAISGSGDDTYYADSVKGRFTISADNSKNTAYLQMNSLKPEDTAVYYCAKLPYVSGDYWGQGTLVTVSS

SEQ ID NO: 139 - protein, 116 aa, Artificial Sequence
  Description of Artificial Sequence: Synthetic polypeptide
EVQLVESGGGLVQPGGSLRLSCAASGGRFSDYGMGWFRQAPGKERELVALISRSGNLKSYADSVKGRFTISADNSKNTAYLQMNSLKPEDTAVYYCAAKTGTSFVWGQGTLVTVSS

SEQ ID NO: 140 - protein, 114 aa, Artificial Sequence
  Description of Artificial Sequence: Synthetic polypeptide
EVQLVESGGGLVQPGGSLRLSCAASGLSFSNYAMGWFRQAPGKERELVAAITSGGSTDYADSVKGRFTISADNSKNTAYLQMNSLKPEDTAVYYCARGDWRYGWGQGTLVTVSS

SEQ ID NO: 141 - protein, 113 aa, Artificial Sequence
  Description of Artificial Sequence: Synthetic polypeptide
EVQLVESGGGLVQPGGSLRLSCAASGIPSTLRAMGWFRQAPGKEREFVALINRSGGSQFYADSVKGRFTISADNSKNTAYLQMNSLKPEDTAVYYCAIGRGSWGQGTLVTVSS

SEQ ID NO: 142 - protein, 9 aa, Artificial Sequence
  Description of Artificial Sequence: Synthetic peptide
FTLDYYAMG

SEQ ID NO: 143 - protein, 13 aa, Artificial Sequence
  Description of Artificial Sequence: Synthetic peptide
AAINWSGDNTHYA

SEQ ID NO: 144 - protein, 23 aa, Artificial Sequence
  Description of Artificial Sequence: Synthetic peptide
CARAPFYCTTTKCQDNYYYMDVW

SEQ ID NO: 145 - protein, 9 aa, Artificial Sequence
  Description of Artificial Sequence: Synthetic peptide
GTFSSIGMG

SEQ ID NO: 146 - protein, 13 aa, Artificial Sequence
  Description of Artificial Sequence: Synthetic peptide
AAISWDGGATAYA

SEQ ID NO: 147 - protein, 12 aa, Artificial Sequence
  Description of Artificial Sequence: Synthetic peptide
CAKEDVGKPFDW

SEQ ID NO: 148 - protein, 9 aa, Artificial Sequence
  Description of Artificial Sequence: Synthetic peptide
FTFSSYAMN

SEQ ID NO: 149 - protein, 9 aa, Artificial Sequence
  Description of Artificial Sequence: Synthetic peptide
FTFSSYGMS

SEQ ID NO: 150 - protein, 9 aa, Artificial Sequence
  Description of Artificial Sequence: Synthetic peptide
FRFSSYSMS

SEQ ID NO: 151 - protein, 9 aa, Artificial Sequence
  Description of Artificial Sequence: Synthetic peptide
FTFSAYAMS

SEQ ID NO: 152 - protein, 8 aa, Artificial Sequence
  Description of Artificial Sequence: Synthetic peptide
FFSSYAMG

SEQ ID NO: 153 - protein, 9 aa, Artificial Sequence
  Description of Artificial Sequence: Synthetic peptide
FTFSSFAMS

SEQ ID NO: 154 - protein, 9 aa, Artificial Sequence
  Description of Artificial Sequence: Synthetic peptide
FTFSAYAMS

SEQ ID NO: 155 - protein, 9 aa, Artificial Sequence
  Description of Artificial Sequence: Synthetic peptide
FTFGSYAMS

SEQ ID NO: 156 - protein, 9 aa, Artificial Sequence
  Description of Artificial Sequence: Synthetic peptide
FTFSAYAMS

SEQ ID NO: 157 - protein, 9 aa, Artificial Sequence
  Description of Artificial Sequence: Synthetic peptide
FIFSSYAMS

SEQ ID NO: 158 - protein, 9 aa, Artificial Sequence
  Description of Artificial Sequence: Synthetic peptide
FTFSDYAMS

SEQ ID NO: 159 - protein, 9 aa, Artificial Sequence
  Description of Artificial Sequence: Synthetic peptide
FTFSSYAMI

SEQ ID NO: 160 - protein, 9 aa, Artificial Sequence
  Description of Artificial Sequence: Synthetic peptide
FTFGSYAMS

SEQ ID NO: 161 - protein, 9 aa, Artificial Sequence
  Description of Artificial Sequence: Synthetic peptide
FTFSRYAMS

SEQ ID NO: 162 - protein, 9 aa, Artificial Sequence
  Description of Artificial Sequence: Synthetic peptide
STFSSYAMS

SEQ ID NO: 163 - protein, 9 aa, Artificial Sequence
  Description of Artificial Sequence: Synthetic peptide
FTFSSYAMT

SEQ ID NO: 164 - protein, 9 aa, Artificial Sequence
  Description of Artificial Sequence: Synthetic peptide
FTFSSYVMS

SEQ ID NO: 165 - protein, 8 aa, Artificial Sequence
  Description of Artificial Sequence: Synthetic peptide
FTFSSYAN

SEQ ID NO: 166 - protein, 9 aa, Artificial Sequence
  Description of Artificial Sequence: Synthetic peptide
FTFSSYDMS

SEQ ID NO: 167 - protein, 9 aa, Artificial Sequence
  Description of Artificial Sequence: Synthetic peptide
FTFSGYAMS

SEQ ID NO: 168 - protein, 9 aa, Artificial Sequence
  Description of Artificial Sequence: Synthetic peptide
FTLSSYAMS

SEQ ID NO: 169 - protein, 9 aa, Artificial Sequence
  Description of Artificial Sequence: Synthetic peptide
FIFSSYAMS

SEQ ID NO: 170 - protein, 9 aa, Artificial Sequence
  Description of Artificial Sequence: Synthetic peptide
FTFSSYAMG

SEQ ID NO: 171 - protein, 9 aa, Artificial Sequence
  Description of Artificial Sequence: Synthetic peptide
STFSSYAMS

SEQ ID NO: 172 - protein, 9 aa, Artificial Sequence
  Description of Artificial Sequence: Synthetic peptide
FTFSSYTMS

SEQ ID NO: 173 - protein, 9 aa, Artificial Sequence
  Description of Artificial Sequence: Synthetic peptide
FTFSSYAMY

SEQ ID NO: 174 - protein, 9 aa, Artificial Sequence
  Description of Artificial Sequence: Synthetic peptide
FTFRSYAMS

SEQ ID NO: 175 - protein, 9 aa, Artificial Sequence
  Description of Artificial Sequence: Synthetic peptide
FTFSSYTMS

SEQ ID NO: 176 - protein, 9 aa, Artificial Sequence
  Description of Artificial Sequence: Synthetic peptide
FTFSSQAMS

SEQ ID NO: 177 - protein, 9 aa, Artificial Sequence
  Description of Artificial Sequence: Synthetic peptide
FTFSSYPMS

SEQ ID NO: 178 - protein, 9 aa, Artificial Sequence
  Description of Artificial Sequence: Synthetic peptide
FTFSSYAMT

SEQ ID NO: 179 - protein, 9 aa, Artificial Sequence
  Description of Artificial Sequence: Synthetic peptide
FTFSSYAMS

SEQ ID NO: 180 - protein, 9 aa, Artificial Sequence
  Description of Artificial Sequence: Synthetic peptide
FTFSSYAMS

SEQ ID NO: 181 - protein, 9 aa, Artificial Sequence
  Description of Artificial Sequence: Synthetic peptide
FTFSSYAVS

SEQ ID NO: 182 - protein, 9 aa, Artificial Sequence
  Description of Artificial Sequence: Synthetic peptide
FTFSSYPMS

SEQ ID NO: 183 - protein, 9 aa, Artificial Sequence
  Description of Artificial Sequence: Synthetic peptide
FTFSSYGMS

SEQ ID NO: 184 - protein, 9 aa, Artificial Sequence
  Description of Artificial Sequence: Synthetic peptide
RTFCRYSMG

SEQ ID NO: 185 - protein, 9 aa, Artificial Sequence
  Description of Artificial Sequence: Synthetic peptide
NIFSRYIMG

SEQ ID NO: 186 - protein, 9 aa, Artificial Sequence
  Description of Artificial Sequence: Synthetic peptide
RTLAGYTMG

SEQ ID NO: 187 - protein, 9 aa, Artificial Sequence
  Description of Artificial Sequence: Synthetic peptide
STLSRYSMG

SEQ ID NO: 188 - protein, 9 aa, Artificial Sequence
  Description of Artificial Sequence: Synthetic peptide
SIFSSAAMG

SEQ ID NO: 189 - protein, 8 aa, Artificial Sequence
  Description of Artificial Sequence: Synthetic peptide
TFSGYLMG

SEQ ID NO: 190 - protein, 9 aa, Artificial Sequence
  Description of Artificial Sequence: Synthetic peptide
RTFSSYDMG

SEQ ID NO: 191 - protein, 8 aa, Artificial Sequence
  Description of Artificial Sequence: Synthetic peptide
SISSYFMG

SEQ ID NO: 192 - protein, 9 aa, Artificial Sequence
  Description of Artificial Sequence: Synthetic peptide
PTFSTYAMG

SEQ ID NO: 193 - protein, 9 aa, Artificial Sequence
  Description of Artificial Sequence: Synthetic peptide
IIGSFRTMG

SEQ ID NO: 194 - protein, 9 aa, Artificial Sequence
  Description of Artificial Sequence: Synthetic peptide
GTFASYGMG

SEQ ID NO: 195 - protein, 9 aa, Artificial Sequence
  Description of Artificial Sequence: Synthetic peptide
LTFRNYAMG

SEQ ID NO: 196 - protein, 9 aa, Artificial Sequence
  Description of Artificial Sequence: Synthetic peptide
SISTINVMG

SEQ ID NO: 197 - protein, 8 aa, Artificial Sequence
  Description of Artificial Sequence: Synthetic peptide
GTLSSYIG

SEQ ID NO: 198 - protein, 9 aa, Artificial Sequence
  Description of Artificial Sequence: Synthetic peptide
RTFRRYPMG

SEQ ID NO: 199 - protein, 9 aa, Artificial Sequence
  Description of Artificial Sequence: Synthetic peptide
STFSIDVMG

SEQ ID NO: 200 - protein, 9 aa, Artificial Sequence
  Description of Artificial Sequence: Synthetic peptide
RTSSSAVMG

SEQ ID NO: 201 - protein, 9 aa, Artificial Sequence
  Description of Artificial Sequence: Synthetic peptide
GTFSSYRMG

SEQ ID NO: 202 - protein, 8 aa, Artificial Sequence
  Description of Artificial Sequence: Synthetic peptide
TIFASAMG

SEQ ID NO: 203 - protein, 7 aa, Artificial Sequence
  Description of Artificial Sequence: Synthetic peptide
FGIDAMG

SEQ ID NO: 204 - protein, 9 aa, Artificial Sequence
  Description of Artificial Sequence: Synthetic peptide
NIIGGNHMG

SEQ ID NO: 205 - protein, 9 aa, Artificial Sequence
  Description of Artificial Sequence: Synthetic peptide
RTFSRYDMG

SEQ ID NO: 206 - protein, 12 aa, Artificial Sequence
  Description of Artificial Sequence: Synthetic peptide
QPAPELRGYGMG

SEQ ID NO: 207 - protein, 9 aa, Artificial Sequence
  Description of Artificial Sequence: Synthetic peptide
INFSRYGMG

SEQ ID NO: 208 - protein, 9 aa, Artificial Sequence
  Description of Artificial Sequence: Synthetic peptide
RTFRRYAMG

SEQ ID NO: 209 - protein, 9 aa, Artificial Sequence
  Description of Artificial Sequence: Synthetic peptide
GTFGHYAMG

SEQ ID NO: 210 - protein, 9 aa, Artificial Sequence
  Description of Artificial Sequence: Synthetic peptide
FTLDDYAMG

SEQ ID NO: 211 - protein, 9 aa, Artificial Sequence
  Description of Artificial Sequence: Synthetic peptide
FTFRRYDMG

SEQ ID NO: 212 - protein, 9 aa, Artificial Sequence
  Description of Artificial Sequence: Synthetic peptide
INFSRNAMG

SEQ ID NO: 213 - protein, 9 aa, Artificial Sequence
  Description of Artificial Sequence: Synthetic peptide
RTFTTYGMG

SEQ ID NO: 214 - protein, 9 aa, Artificial Sequence
  Description of Artificial Sequence: Synthetic peptide
STFSINAMG

SEQ ID NO: 215 - protein, 9 aa, Artificial Sequence
  Description of Artificial Sequence: Synthetic peptide
FTFSNYAMR

SEQ ID NO: 216 - protein, 9 aa, Artificial Sequence
  Description of Artificial Sequence: Synthetic peptide
FAFSRHAMS

SEQ ID NO: 217 - protein, 9 aa, Artificial Sequence
  Description of Artificial Sequence: Synthetic peptide
RTFSINAMG

SEQ ID NO: 218 - protein, 9 aa, Artificial Sequence
  Description of Artificial Sequence: Synthetic peptide
FTFSSYGMN

SEQ ID NO: 219 - protein, 9 aa, Artificial Sequence
  Description of Artificial Sequence: Synthetic peptide
RTFSTDAMG

SEQ ID NO: 220 - protein, 7 aa, Artificial Sequence
  Description of Artificial Sequence: Synthetic peptide
RIFYPMG

SEQ ID NO: 221 - protein, 9 aa, Artificial Sequence
  Description of Artificial Sequence: Synthetic peptide
FTFGSYDMG

SEQ ID NO: 222 - protein, 9 aa, Artificial Sequence
  Description of Artificial Sequence: Synthetic peptide
STFTINAMG

SEQ ID NO: 223 - protein, 9 aa, Artificial Sequence
  Description of Artificial Sequence: Synthetic peptide
GTFSSIGMG

SEQ ID NO: 224 - protein, 6 aa, Artificial Sequence
  Description of Artificial Sequence: Synthetic peptide
RTYAMG

SEQ ID NO: 225 - protein, 9 aa, Artificial Sequence
  Description of Artificial Sequence: Synthetic peptide
LPFSTKSMG

SEQ ID NO: 226 - protein, 9 aa, Artificial Sequence
  Description of Artificial Sequence: Synthetic peptide
RTIVPYTMG

SEQ ID NO: 227 - protein, 9 aa, Artificial Sequence
  Description of Artificial Sequence: Synthetic peptide
LRLNMHRMG

SEQ ID NO: 228 - protein, 9 aa, Artificial Sequence
  Description of Artificial Sequence: Synthetic peptide
STFSINAMG

SEQ ID NO: 229 - protein, 9 aa, Artificial Sequence
  Description of Artificial Sequence: Synthetic peptide
STLPYHAMG

SEQ ID NO: 230 - protein, 9 aa, Artificial Sequence
  Description of Artificial Sequence: Synthetic peptide
FTFTSYAIS

SEQ ID NO: 231 - protein, 9 aa, Artificial Sequence
  Description of Artificial Sequence: Synthetic peptide
FSLDYYGMG

SEQ ID NO: 232 - protein, 9 aa, Artificial Sequence
  Description of Artificial Sequence: Synthetic peptide
LTDRRYTMG

SEQ ID NO: 233 - protein, 9 aa, Artificial Sequence
  Description of Artificial Sequence: Synthetic peptide
RTFRRYTMG

SEQ ID NO: 234 - protein, 9 aa, Artificial Sequence
  Description of Artificial Sequence: Synthetic peptide
PTFSIYAMG

SEQ ID NO: 235 - protein, 9 aa, Artificial Sequence
  Description of Artificial Sequence: Synthetic peptide
RTISRYTMG

SEQ ID NO: 236 - protein, 9 aa, Artificial Sequence
  Description of Artificial Sequence: Synthetic peptide
RTITRYTMG

SEQ ID NO: 237 - protein, 9 aa, Artificial Sequence
  Description of Artificial Sequence: Synthetic peptide
FTFENHAMG

SEQ ID NO: 238 - protein, 9 aa, Artificial Sequence
  Description of Artificial Sequence: Synthetic peptide
FTFSRHAMN

SEQ ID NO: 239 - protein, 9 aa, Artificial Sequence
  Description of Artificial Sequence: Synthetic peptide
FTFDDYSMG

SEQ ID NO: 240 - protein, 9 aa, Artificial Sequence
  Description of Artificial Sequence: Synthetic peptide
STFSINAMG

SEQ ID NO: 241 - protein, 6 aa, Artificial Sequence
  Description of Artificial Sequence: Synthetic peptide
QTFNMG

SEQ ID NO: 242 - protein, 9 aa, Artificial Sequence
  Description of Artificial Sequence: Synthetic peptide
NTFSDNPMG

SEQ ID NO: 243 - protein, 9 aa, Artificial Sequence
  Description of Artificial Sequence: Synthetic peptide
RTHSIYPMG

SEQ ID NO: 244 - protein, 9 aa, Artificial Sequence
  Description of Artificial Sequence: Synthetic peptide
RTFSMHAMG

SEQ ID NO: 245 - protein, 9 aa, Artificial Sequence
  Description of Artificial Sequence: Synthetic peptide
FTFSNYSMG

SEQ ID NO: 246 - protein, 9 aa, Artificial Sequence
  Description of Artificial Sequence: Synthetic peptide
STFSVNAMG

SEQ ID NO: 247 - protein, 9 aa, Artificial Sequence
  Description of Artificial Sequence: Synthetic peptide
SIGSINAMG

SEQ ID NO: 248 - protein, 9 aa, Artificial Sequence
  Description of Artificial Sequence: Synthetic peptide
RTFGSYDMG

SEQ ID NO: 249 - protein, 9 aa, Artificial Sequence
  Description of Artificial Sequence: Synthetic peptide
GTFGHYAMG

SEQ ID NO: 250 - protein, 9 aa, Artificial Sequence
  Description of Artificial Sequence: Synthetic peptide
FGFGSYDMG

SEQ ID NO: 251 - protein, 9 aa, Artificial Sequence
  Description of Artificial Sequence: Synthetic peptide
STLSINAMG

SEQ ID NO: 252 - protein, 9 aa, Artificial Sequence
  Description of Artificial Sequence: Synthetic peptide
RPFSEYTMG

SEQ ID NO: 253 - protein, 9 aa, Artificial Sequence
  Description of Artificial Sequence: Synthetic peptide
RTFSNYPMG

SEQ ID NO: 254 - protein, 9 aa, Artificial Sequence
  Description of Artificial Sequence: Synthetic peptide
RTFRRYTMG

SEQ ID NO: 255 - protein, 9 aa, Artificial Sequence
  Description of Artificial Sequence: Synthetic peptide
RTFSTYVMG

SEQ ID NO: 256 - protein, 9 aa, Artificial Sequence
  Description of Artificial Sequence: Synthetic peptide
FTLDYYGMG

SEQ ID NO: 257 - protein, 9 aa, Artificial Sequence
  Description of Artificial Sequence: Synthetic peptide
FTFGHYAMG

SEQ ID NO: 258 - protein, 9 aa, Artificial Sequence
  Description of Artificial Sequence: Synthetic peptide
FTFEDYAMG

SEQ ID NO: 259 - protein, 9 aa, Artificial Sequence
  Description of Artificial Sequence: Synthetic peptide
RTLSRYTMG

SEQ ID NO: 260 - protein, 9 aa, Artificial Sequence
  Description of Artificial Sequence: Synthetic peptide
RTFASYAMG

SEQ ID NO: 261 - protein, 7 aa, Artificial Sequence
  Description of Artificial Sequence: Synthetic peptide
GTYHAMG

SEQ ID NO: 262 - protein, 9 aa, Artificial Sequence
  Description of Artificial Sequence: Synthetic peptide
TTLDYYAMG

SEQ ID NO: 263 - protein, 9 aa, Artificial Sequence
  Description of Artificial Sequence: Synthetic peptide
GTLSRSRMG

SEQ ID NO: 264 - protein, 9 aa, Artificial Sequence
  Description of Artificial Sequence: Synthetic peptide
GTFSFYNMG

SEQ ID NO: 265 - protein, 9 aa, Artificial Sequence
  Description of Artificial Sequence: Synthetic peptide
FTFDYYAMG

SEQ ID NO: 266 - protein, 9 aa, Artificial Sequence
  Description of Artificial Sequence: Synthetic peptide
FPFSIWPMG

SEQ ID NO: 267 - protein, 8 aa, Artificial Sequence
  Description of Artificial Sequence: Synthetic peptide
FAESSSMG

SEQ ID NO: 268 - protein, 9 aa, Artificial Sequence
  Description of Artificial Sequence: Synthetic peptide
FTFGTTTMG

SEQ ID NO: 269 - protein, 9 aa, Artificial Sequence
  Description of Artificial Sequence: Synthetic peptide
FIGNYHAMG

SEQ ID NO: 270 - protein, 9 aa, Artificial Sequence
  Description of Artificial Sequence: Synthetic peptide
RTFSDDTMG

SEQ ID NO: 271 - protein, 9 aa, Artificial Sequence
  Description of Artificial Sequence: Synthetic peptide
RTFGDYIMG

SEQ ID NO: 272 - protein, 9 aa, Artificial Sequence
  Description of Artificial Sequence: Synthetic peptide
RTFSDDAMG

SEQ ID NO: 273 - protein, 9 aa, Artificial Sequence
  Description of Artificial Sequence: Synthetic peptide
RTFGDYIMG

SEQ ID NO: 274 - protein, 9 aa, Artificial Sequence
  Description of Artificial Sequence: Synthetic peptide
RTFGDDTMG

SEQ ID NO: 275 - protein, 9 aa, Artificial Sequence
  Description of Artificial Sequence: Synthetic peptide
RTFGDDTMG

SEQ ID NO: 276 - protein, 9 aa, Artificial Sequence
  Description of Artificial Sequence: Synthetic peptide
RTFGDYIMG

SEQ ID NO: 277 - protein, 9 aa, Artificial Sequence
  Description of Artificial Sequence: Synthetic peptide
RTFGDYIMG

SEQ ID NO: 278 - protein, 9 aa, Artificial Sequence
  Description of Artificial Sequence: Synthetic peptide
RTFGDYIMG

SEQ ID NO: 279 - protein, 9 aa, Artificial Sequence
  Description of Artificial Sequence: Synthetic peptide
RTFSDDTMG

SEQ ID NO: 280 - protein, 9 aa, Artificial Sequence
  Description of Artificial Sequence: Synthetic peptide
RTFGDYAMG

SEQ ID NO: 281 - protein, 9 aa, Artificial Sequence
  Description of Artificial Sequence: Synthetic peptide
RTFGDDTMG

SEQ ID NO: 282 - protein, 9 aa, Artificial Sequence
  Description of Artificial Sequence: Synthetic peptide
RTFGDDTMG

SEQ ID NO: 283 - protein, 9 aa, Artificial Sequence
  Description of Artificial Sequence: Synthetic peptide
RTFSDDTMG

SEQ ID NO: 284 - protein, 9 aa, Artificial Sequence
  Description of Artificial Sequence: Synthetic peptide
RTFSDDTMG

SEQ ID NO: 285 - protein, 9 aa, Artificial Sequence
  Description of Artificial Sequence: Synthetic peptide
RTFSDYTMG

SEQ ID NO: 286 - protein, 9 aa, Artificial Sequence
  Description of Artificial Sequence: Synthetic peptide
RTFGDDTMG

SEQ ID NO: 287 - protein, 9 aa, Artificial Sequence
  Description of Artificial Sequence: Synthetic peptide
RTFGDYIMG

SEQ ID NO: 288 - protein, 9 aa, Artificial Sequence
  Description of Artificial Sequence: Synthetic peptide
RTFSDDTMG

SEQ ID NO: 289 - protein, 9 aa, Artificial Sequence
  Description of Artificial Sequence: Synthetic peptide
RTFGDDIMG

SEQ ID NO: 290 - protein, 9 aa, Artificial Sequence
  Description of Artificial Sequence: Synthetic peptide
RTFSDDTMG

SEQ ID NO: 291 - protein, 9 aa, Artificial Sequence
  Description of Artificial Sequence: Synthetic peptide
RTFGDYIMG

SEQ ID NO: 292 - protein, 9 aa, Artificial Sequence
  Description of Artificial Sequence: Synthetic peptide
RTFSDDAMG

SEQ ID NO: 293 - protein, 9 aa, Artificial Sequence
  Description of Artificial Sequence: Synthetic peptide
RTFSDYTMG

SEQ ID NO: 294 - protein, 9 aa, Artificial Sequence
  Description of Artificial Sequence: Synthetic peptide
GTFSRYAMG

SEQ ID NO: 295 - protein, 9 aa, Artificial Sequence
  Description of Artificial Sequence: Synthetic peptide
RTFSDDTMG

SEQ ID NO: 296 - protein, 9 aa, Artificial Sequence
  Description of Artificial Sequence: Synthetic peptide
RTFGDYIMG

SEQ ID NO: 297 - protein, 9 aa, Artificial Sequence
  Description of Artificial Sequence: Synthetic peptide
RTFGDDTMG

SEQ ID NO: 298 - protein, 9 aa, Artificial Sequence
  Description of Artificial Sequence: Synthetic peptide
RTFGDDTMG

SEQ ID NO: 299 - protein, 9 aa, Artificial Sequence
  Description of Artificial Sequence: Synthetic peptide
RTFGDYTMG

SEQ ID NO: 300 - protein, 9 aa, Artificial Sequence
  Description of Artificial Sequence: Synthetic peptide
RTFGDYIMG

SEQ ID NO: 301 - protein, 9 aa, Artificial Sequence
  Description of Artificial Sequence: Synthetic peptide
FTFDDYEMG

SEQ ID NO: 302 - protein, 9 aa, Artificial Sequence
  Description of Artificial Sequence: Synthetic peptide
FTFSRHDMG

SEQ ID NO: 303 - protein, 9 aa, Artificial Sequence
  Description of Artificial Sequence: Synthetic peptide
RTFGDYIMG

SEQ ID NO: 304 - protein, 11 aa, Artificial Sequence
  Description of Artificial Sequence: Synthetic peptide
QLANFASYAMG

SEQ ID NO: 305 - protein, 9 aa, Artificial Sequence
  Description of Artificial Sequence: Synthetic peptide
RTFGDYIMG

SEQ ID NO: 306 - protein, 9 aa, Artificial Sequence
  Description of Artificial Sequence: Synthetic peptide
RTFGDYGMG

SEQ ID NO: 307 - protein, 9 aa, Artificial Sequence
  Description of Artificial Sequence: Synthetic peptide
RTFSDDTMG

SEQ ID NO: 308 - protein, 9 aa, Artificial Sequence
  Description of Artificial Sequence: Synthetic peptide
RTFSNAAMG

SEQ ID NO: 309 - protein, 9 aa, Artificial Sequence
  Description of Artificial Sequence: Synthetic peptide
RTFSDDTMG

SEQ ID NO: 310 - protein, 9 aa, Artificial Sequence
  Description of Artificial Sequence: Synthetic peptide
RTFGDYIMG

SEQ ID NO: 311 - protein, 9 aa, Artificial Sequence
  Description of Artificial Sequence: Synthetic peptide
RTFGDDTMG

SEQ ID NO: 312 - protein, 9 aa, Artificial Sequence
  Description of Artificial Sequence: Synthetic peptide
RTFSDDTMG

SEQ ID NO: 313 - protein, 9 aa, Artificial Sequence
  Description of Artificial Sequence: Synthetic peptide
RTFGDYIMG

SEQ ID NO: 314 - protein, 9 aa, Artificial Sequence
  Description of Artificial Sequence: Synthetic peptide
RTFSDDAMG

SEQ ID NO: 315 - protein, 9 aa, Artificial Sequence
  Description of Artificial Sequence: Synthetic peptide
RTFGDYIMG

SEQ ID NO: 316 - protein, 9 aa, Artificial Sequence
  Description of Artificial Sequence: Synthetic peptide
FTFGDYVMG

SEQ ID NO: 317 - protein, 9 aa, Artificial Sequence
  Description of Artificial Sequence: Synthetic peptide
RTFSDDAMG

SEQ ID NO: 318 - protein, 9 aa, Artificial Sequence
  Description of Artificial Sequence: Synthetic peptide
RTFGDYIMG

SEQ ID NO: 319 - protein, 9 aa, Artificial Sequence
  Description of Artificial Sequence: Synthetic peptide
GTFSNSGMG

SEQ ID NO: 320 - protein, 9 aa, Artificial Sequence
  Description of Artificial Sequence: Synthetic peptide
FTFSNYATD

SEQ ID NO: 321 - protein, 9 aa, Artificial Sequence
  Description of Artificial Sequence: Synthetic peptide
FTFSRHAMN

SEQ ID NO: 322 - protein, 9 aa, Artificial Sequence
  Description of Artificial Sequence: Synthetic peptide
FTFSDFAMA

SEQ ID NO: 323 - protein, 9 aa, Artificial Sequence
  Description of Artificial Sequence: Synthetic peptide
FTFSDFAMA

SEQ ID NO: 324 - protein, 9 aa, Artificial Sequence
  Description of Artificial Sequence: Synthetic peptide
FTFSDFAMA

SEQ ID NO: 325 - protein, 9 aa, Artificial Sequence
  Description of Artificial Sequence: Synthetic peptide
FTFSDFAMA

SEQ ID NO: 326 - protein, 9 aa, Artificial Sequence
  Description of Artificial Sequence: Synthetic peptide
FTFSDFAMA

SEQ ID NO: 327 - protein, 9 aa, Artificial Sequence
  Description of Artificial Sequence: Synthetic peptide
FTFSDFAMA

SEQ ID NO: 328 - protein, 9 aa, Artificial Sequence
  Description of Artificial Sequence: Synthetic peptide
FTFPRYAMS

SEQ ID NO: 329 - protein, 9 aa, Artificial Sequence
  Description of Artificial Sequence: Synthetic peptide
FTFSAFAMG

SEQ ID NO: 330 - protein, 9 aa, Artificial Sequence
  Description of Artificial Sequence: Synthetic peptide
FTFSNYPMN

SEQ ID NO: 331 - protein, 9 aa, Artificial Sequence
  Description of Artificial Sequence: Synthetic peptide
FTFSDYPMN

SEQ ID NO: 332 - protein, 9 aa, Artificial Sequence
  Description of Artificial Sequence: Synthetic peptide
FTFSDYPMN

SEQ ID NO: 333 - protein, 9 aa, Artificial Sequence
  Description of Artificial Sequence: Synthetic peptide
FTFSDYPMN

SEQ ID NO: 334 - protein, 9 aa, Artificial Sequence
  Description of Artificial Sequence: Synthetic peptide
FTFSDYPMN

SEQ ID NO: 335 - protein, 9 aa, Artificial Sequence
  Description of Artificial Sequence: Synthetic peptide
FMFGNYAMS

SEQ ID NO: 336 - protein, 9 aa, Artificial Sequence
  Description of Artificial Sequence: Synthetic peptide
FTFRSHAMN

SEQ ID NO: 337 - protein, 9 aa, Artificial Sequence
  Description of Artificial Sequence: Synthetic peptide
FTFRNYAMA

SEQ ID NO: 338 - protein, 9 aa, Artificial Sequence
  Description of Artificial Sequence: Synthetic peptide
FTFRNHAMA

SEQ ID NO: 339 - protein, 9 aa, Artificial Sequence
  Description of Artificial Sequence: Synthetic peptide
FTITNYAMS

SEQ ID NO: 340 - protein, 9 aa, Artificial Sequence
  Description of Artificial Sequence: Synthetic peptide
FTIPNYAMS

SEQ ID NO: 341 - protein, 9 aa, Artificial Sequence
  Description of Artificial Sequence: Synthetic peptide
FTIPNYAMS

SEQ ID NO: 342 - protein, 9 aa, Artificial Sequence
  Description of Artificial Sequence: Synthetic peptide
FTITNYAMS

SEQ ID NO: 343 - protein, 9 aa, Artificial Sequence
  Description of Artificial Sequence: Synthetic peptide
FTITNYAMS

SEQ ID NO: 344 - protein, 9 aa, Artificial Sequence
  Description of Artificial Sequence: Synthetic peptide
FTFRSHAMS

SEQ ID NO: 345 - protein, 9 aa, Artificial Sequence
  Description of Artificial Sequence: Synthetic peptide
FTIRNYAMS

SEQ ID NO: 346 - protein, 9 aa, Artificial Sequence
  Description of Artificial Sequence: Synthetic peptide
FTFRSHAMS

SEQ ID NO: 347 - protein, 9 aa, Artificial Sequence
  Description of Artificial Sequence: Synthetic peptide
FTFRSHAMS

SEQ ID NO: 348 - protein, 9 aa, Artificial Sequence
  Description of Artificial Sequence: Synthetic peptide
FTFRSYAMS

SEQ ID NO: 349 - protein, 9 aa, Artificial Sequence
  Description of Artificial Sequence: Synthetic peptide
FTFSAYSMS

SEQ ID NO: 350 - protein, 9 aa, Artificial Sequence
  Description of Artificial Sequence: Synthetic peptide
FTFSNYATD

SEQ ID NO: 351 - protein, 9 aa, Artificial Sequence
  Description of Artificial Sequence: Synthetic peptide
FTFSAFAMG

SEQ ID NO: 352 - protein, 9 aa, Artificial Sequence
  Description of Artificial Sequence: Synthetic peptide
FTFSDFAMA

SEQ ID NO: 353 - protein, 9 aa, Artificial Sequence
  Description of Artificial Sequence: Synthetic peptide
FTFSRHAMN

SEQ ID NO: 354 - protein, 9 aa, Artificial Sequence
  Description of Artificial Sequence: Synthetic peptide
FTFSDFAMA

SEQ ID NO: 355 - protein, 9 aa, Artificial Sequence
  Description of Artificial Sequence: Synthetic peptide
FTFSNYPMN

SEQ ID NO: 356 - protein, 9 aa, Artificial Sequence
  Description of Artificial Sequence: Synthetic peptide
FTFSDFAMA

SEQ ID NO: 357 - protein, 9 aa, Artificial Sequence
  Description of Artificial Sequence: Synthetic peptide
FTFSDYPMN

SEQ ID NO: 358 - protein, 9 aa, Artificial Sequence
  Description of Artificial Sequence: Synthetic peptide
FTFSDYPMN

SEQ ID NO: 359 - protein, 9 aa, Artificial Sequence
  Description of Artificial Sequence: Synthetic peptide
FTFSDFAMA

SEQ ID NO: 360 - protein, 9 aa, Artificial Sequence
  Description of Artificial Sequence: Synthetic peptide
FTFSDYPMN

SEQ ID NO: 361 - protein, 9 aa, Artificial Sequence
  Description of Artificial Sequence: Synthetic peptide
FTFSDFAMA

SEQ ID NO: 362 - protein, 9 aa, Artificial Sequence
  Description of Artificial Sequence: Synthetic peptide
FTFSDFAMA

SEQ ID NO: 363 - protein, 9 aa, Artificial Sequence
  Description of Artificial Sequence: Synthetic peptide
FTFPRYAMS

SEQ ID NO: 364 - protein, 9 aa, Artificial Sequence
  Description of Artificial Sequence: Synthetic peptide
FTFPRYAMS

SEQ ID NO: 365 - protein, 9 aa, Artificial Sequence
  Description of Artificial Sequence: Synthetic peptide
FTFTTYALS

SEQ ID NO: 366 - protein, 9 aa, Artificial Sequence
  Description of Artificial Sequence: Synthetic peptide
FTFSRHAMN

SEQ ID NO: 367 - protein, 9 aa, Artificial Sequence
  Description of Artificial Sequence: Synthetic peptide
FVFSSYAMS

SEQ ID NO: 368 - protein, 9 aa, Artificial Sequence
  Description of Artificial Sequence: Synthetic peptide
FTLSSYVMS

SEQ ID NO: 369 - protein, 9 aa, Artificial Sequence
  Description of Artificial Sequence: Synthetic peptide
FTFSTYAMS

SEQ ID NO: 370 - protein, 9 aa, Artificial Sequence
  Description of Artificial Sequence: Synthetic peptide
FTYSNYAMT

SEQ ID NO: 371 - protein, 9 aa, Artificial Sequence
  Description of Artificial Sequence: Synthetic peptide
FTFSNYPMN

SEQ ID NO: 372 - protein, 9 aa, Artificial Sequence
  Description of Artificial Sequence: Synthetic peptide
FTFRSHAMS

SEQ ID NO: 373 - protein, 9 aa, Artificial Sequence
  Description of Artificial Sequence: Synthetic peptide
FTFSAYSMS

SEQ ID NO: 374 - protein, 9 aa, Artificial Sequence
  Description of Artificial Sequence: Synthetic peptide
FMFGNYAMS

SEQ ID NO: 375 - protein, 9 aa, Artificial Sequence
  Description of Artificial Sequence: Synthetic peptide
FTFRNHAMA

SEQ ID NO: 376 - protein, 9 aa, Artificial Sequence
  Description of Artificial Sequence: Synthetic peptide
FTIPNYAMS

SEQ ID NO: 377 - protein, 9 aa, Artificial Sequence
  Description of Artificial Sequence: Synthetic peptide
FTFRNYAMA

SEQ ID NO: 378 - protein, 9 aa, Artificial Sequence
  Description of Artificial Sequence: Synthetic peptide
FTIRNYAMS

SEQ ID NO: 379 - protein, 9 aa, Artificial Sequence
  Description of Artificial Sequence: Synthetic peptide
FTIPNYAMS

SEQ ID NO: 380 - protein, 9 aa, Artificial Sequence
  Description of Artificial Sequence: Synthetic peptide
FTITNYAMS

SEQ ID NO: 381 - protein, 9 aa, Artificial Sequence
  Description of Artificial Sequence: Synthetic peptide
FTFRSHAMS

SEQ ID NO: 382 - protein, 9 aa, Artificial Sequence
  Description of Artificial Sequence: Synthetic peptide
FTITNYAMS

SEQ ID NO: 383 - protein, 9 aa, Artificial Sequence
  Description of Artificial Sequence: Synthetic peptide
FTFRSHAMN

SEQ ID NO: 384 - protein, 9 aa, Artificial Sequence
  Description of Artificial Sequence: Synthetic peptide
FTFRSHAMS

SEQ ID NO: 385 - protein, 9 aa, Artificial Sequence
  Description of Artificial Sequence: Synthetic peptide
FTFRSYAMS

SEQ ID NO: 386 - protein, 9 aa, Artificial Sequence
  Description of Artificial Sequence: Synthetic peptide
FTITNYAMS

SEQ ID NO: 387 - protein, 9 aa, Artificial Sequence
  Description of Artificial Sequence: Synthetic peptide
FTFTNFAMS

SEQ ID NO: 388 - protein, 9 aa, Artificial Sequence
  Description of Artificial Sequence: Synthetic peptide
FTFRSYPMS

SEQ ID NO: 389 - protein, 9 aa, Artificial Sequence
  Description of Artificial Sequence: Synthetic peptide
FTLTSYAMS

SEQ ID NO: 390 - protein, 9 aa, Artificial Sequence
  Description of Artificial Sequence: Synthetic peptide
FTFINYAMS

SEQ ID NO: 391 - protein, 9 aa, Artificial Sequence
  Description of Artificial Sequence: Synthetic peptide
FPFSTYAMS

SEQ ID NO: 392 - protein, 9 aa, Artificial Sequence
  Description of Artificial Sequence: Synthetic peptide
FTFSTYAMG

SEQ ID NO: 393 - protein, 9 aa, Artificial Sequence
  Description of Artificial Sequence: Synthetic peptide
FIFSDYAMT

SEQ ID NO: 394 - protein, 9 aa, Artificial Sequence
  Description of Artificial Sequence: Synthetic peptide
FTFSDYAMT

SEQ ID NO: 395 - protein, 9 aa, Artificial Sequence
  Description of Artificial Sequence: Synthetic peptide
FTFSIYAMG

SEQ ID NO: 396 - protein, 9 aa, Artificial Sequence
  Description of Artificial Sequence: Synthetic peptide
FTFASYAMT

SEQ ID NO: 397 - protein, 9 aa, Artificial Sequence
  Description of Artificial Sequence: Synthetic peptide
FTFSEYAMS

SEQ ID NO: 398 - protein, 9 aa, Artificial Sequence
  Description of Artificial Sequence: Synthetic peptide
FTFDDYAMS

SEQ ID NO: 399 - protein, 9 aa, Artificial Sequence
  Description of Artificial Sequence: Synthetic peptide
FTFNNYAMN

SEQ ID NO: 400 - protein, 9 aa, Artificial Sequence
  Description of Artificial Sequence: Synthetic peptide
FTFTNHAMS

SEQ ID NO: 401 - protein, 7 aa, Artificial Sequence
  Description of Artificial Sequence: Synthetic peptide
PGTAIMG

SEQ ID NO: 402 - protein, 9 aa, Artificial Sequence
  Description of Artificial Sequence: Synthetic peptide
RSFSNSVMG

SEQ ID NO: 403 - protein, 9 aa, Artificial Sequence
  Description of Artificial Sequence: Synthetic peptide
RTFGDDTMG

SEQ ID NO: 404 - protein, 9 aa, Artificial Sequence
  Description of Artificial Sequence: Synthetic peptide
RTFSDARMG

SEQ ID NO: 405 - protein, 9 aa, Artificial Sequence
  Description of Artificial Sequence: Synthetic peptide
RTFGDYIMG

SEQ ID NO: 406 - protein, 9 aa, Artificial Sequence
  Description of Artificial Sequence: Synthetic peptide
SGLSINAMG

SEQ ID NO: 407 - protein, 9 aa, Artificial Sequence
  Description of Artificial Sequence: Synthetic peptide
RTFSNAAMG

SEQ ID NO: 408 - protein, 9 aa, Artificial Sequence
  Description of Artificial Sequence: Synthetic peptide
FSLDYYGMG

SEQ ID NO: 409 - protein, 9 aa, Artificial Sequence
  Description of Artificial Sequence: Synthetic peptide
FTFSRHDMG

SEQ ID NO: 410 - protein, 9 aa, Artificial Sequence
  Description of Artificial Sequence: Synthetic peptide
LTFRNYAMG

SEQ ID NO: 411 - protein, 9 aa, Artificial Sequence
  Description of Artificial Sequence: Synthetic peptide
GTFSRYAMG

SEQ ID NO: 412 - protein, 9 aa, Artificial Sequence
  Description of Artificial Sequence: Synthetic peptide
FTLDYYDMG

SEQ ID NO: 413 - protein, 9 aa, Artificial Sequence
  Description of Artificial Sequence: Synthetic peptide
RTFGDYIMG

SEQ ID NO: 414 - protein, 9 aa, Artificial Sequence
  Description of Artificial Sequence: Synthetic peptide
RTFGDDIMG

SEQ ID NO: 415 - protein, 9 aa, Artificial Sequence
  Description of Artificial Sequence: Synthetic peptide
RTFGDYIMG

SEQ ID NO: 416 - protein, 9 aa, Artificial Sequence
  Description of Artificial Sequence: Synthetic peptide
RTFGDYIMG

SEQ ID NO: 417 - protein, 9 aa, Artificial Sequence
  Description of Artificial Sequence: Synthetic peptide
RTFSDDTMG

SEQ ID NO: 418 - protein, 9 aa, Artificial Sequence
  Description of Artificial Sequence: Synthetic peptide
RTFGDDTMG

SEQ ID NO: 419 - protein, 9 aa, Artificial Sequence
  Description of Artificial Sequence: Synthetic peptide
RTFGDYIMG

SEQ ID NO: 420 - protein, 9 aa, Artificial Sequence
  Description of Artificial Sequence: Synthetic peptide
RTFGDDTMG

SEQ ID NO: 421 - protein, 9 aa, Artificial Sequence
  Description of Artificial Sequence: Synthetic peptide
RTFSDYTMG

SEQ ID NO: 422 - protein, 9 aa, Artificial Sequence
  Description of Artificial Sequence: Synthetic peptide
RTFGDYGMG

SEQ ID NO: 423 - protein, 9 aa, Artificial Sequence
  Description of Artificial Sequence: Synthetic peptide
RTFSDDTMG

SEQ ID NO: 424 - protein, 9 aa, Artificial Sequence
  Description of Artificial Sequence: Synthetic peptide
RTFSDDIMG

SEQ ID NO: 425 - protein, 9 aa, Artificial Sequence
  Description of Artificial Sequence: Synthetic peptide
RTFGDYIMG

SEQ ID NO: 426 - protein, 10 aa, Artificial Sequence
  Description of Artificial Sequence: Synthetic peptide
FTFDDDYVMG

SEQ ID NO: 427 - protein, 9 aa, Artificial Sequence
  Description of Artificial Sequence: Synthetic peptide
RTFGDYIMG

SEQ ID NO: 428 - protein, 9 aa, Artificial Sequence
  Description of Artificial Sequence: Synthetic peptide
RTFGDYIMG

SEQ ID NO: 429 - protein, 9 aa, Artificial Sequence
  Description of Artificial Sequence: Synthetic peptide
RTFGDDTMG

SEQ ID NO: 430 - protein, 9 aa, Artificial Sequence
  Description of Artificial Sequence: Synthetic peptide
RTFSDDTMG

SEQ ID NO: 431 - protein, 9 aa, Artificial Sequence
  Description of Artificial Sequence: Synthetic peptide
RTFSDDTMG

SEQ ID NO: 432 - protein, 9 aa, Artificial Sequence
  Description of Artificial Sequence: Synthetic peptide
RTFSDDTMG

SEQ ID NO: 433 - protein, 9 aa, Artificial Sequence
  Description of Artificial Sequence: Synthetic peptide
RTFSDDAMG

SEQ ID NO: 434 - protein, 9 aa, Artificial Sequence
  Description of Artificial Sequence: Synthetic peptide
RTFSDDTMG

SEQ ID NO: 435 - protein, 9 aa, Artificial Sequence
  Description of Artificial Sequence: Synthetic peptide
RTFGDYIMG

SEQ ID NO: 436 - protein, 9 aa, Artificial Sequence
  Description of Artificial Sequence: Synthetic peptide
RTFGDDTMG

SEQ ID NO: 437 - protein, 9 aa, Artificial Sequence
  Description of Artificial Sequence: Synthetic peptide
RTFSDDAMG

SEQ ID NO: 438 - protein, 9 aa, Artificial Sequence
  Description of Artificial Sequence: Synthetic peptide
RTFGDYIMG

SEQ ID NO: 439 - protein, 9 aa, Artificial Sequence
  Description of Artificial Sequence: Synthetic peptide
RTFSDDTMG

SEQ ID NO: 440 - protein, 9 aa, Artificial Sequence
  Description of Artificial Sequence: Synthetic peptide
RTFSDDAMG

SEQ ID NO: 441 - protein, 9 aa, Artificial Sequence
  Description of Artificial Sequence: Synthetic peptide
FTFDDYEMG

SEQ ID NO: 442 - protein, 9 aa, Artificial Sequence
  Description of Artificial Sequence: Synthetic peptide
RTFGDDTMG

SEQ ID NO: 443 - protein, 9 aa, Artificial Sequence
  Description of Artificial Sequence: Synthetic peptide
RTFSDDAMG

SEQ ID NO: 444 - protein, 9 aa, Artificial Sequence
  Description of Artificial Sequence: Synthetic peptide
VTLDDYAMG

SEQ ID NO: 445 - protein, 9 aa, Artificial Sequence
  Description of Artificial Sequence: Synthetic peptide
RTFGDYIMG

SEQ ID NO: 446 - protein, 9 aa, Artificial Sequence
  Description of Artificial Sequence: Synthetic peptide
LTFSDDTMG

SEQ ID NO: 447 - protein, 9 aa, Artificial Sequence
  Description of Artificial Sequence: Synthetic peptide
RTFGDDTMG

SEQ ID NO: 448 - protein, 9 aa, Artificial Sequence
  Description of Artificial Sequence: Synthetic peptide
RTFGDYIMG

SEQ ID NO: 449 - protein, 9 aa, Artificial Sequence
  Description of Artificial Sequence: Synthetic peptide
RTFGDDTMG

SEQ ID NO: 450 - protein, 9 aa, Artificial Sequence
  Description of Artificial Sequence: Synthetic peptide
RTFGDYTMG

SEQ ID NO: 451 - protein, 9 aa, Artificial Sequence
  Description of Artificial Sequence: Synthetic peptide
RTFSDDTMG

SEQ ID NO: 452 - protein, 9 aa, Artificial Sequence
  Description of Artificial Sequence: Synthetic peptide
RTFGDYAMG

SEQ ID NO: 453 - protein, 9 aa, Artificial Sequence
  Description of Artificial Sequence: Synthetic peptide
GTFSNSGMG

SEQ ID NO: 454 - protein, 11 aa, Artificial Sequence
  Description of Artificial Sequence: Synthetic peptide
QLANFASYAMG

SEQ ID NO: 455 - protein, 9 aa, Artificial Sequence
  Description of Artificial Sequence: Synthetic peptide
RTFSDDIMG

SEQ ID NO: 456 - protein, 9 aa, Artificial Sequence
  Description of Artificial Sequence: Synthetic peptide
RTFGDYIMG

SEQ ID NO: 457 - protein, 9 aa, Artificial Sequence
  Description of Artificial Sequence: Synthetic peptide
RTFSDDTMG

SEQ ID NO: 458 - protein, 9 aa, Artificial Sequence
  Description of Artificial Sequence: Synthetic peptide
RTFSDDTMG

SEQ ID NO: 459 - protein, 9 aa, Artificial Sequence
  Description of Artificial Sequence: Synthetic peptide
RTFGDYIMG

SEQ ID NO: 460 - protein, 9 aa, Artificial Sequence
  Description of Artificial Sequence: Synthetic peptide
RTFGDYIMG

SEQ ID NO: 461 - protein, 9 aa, Artificial Sequence
  Description of Artificial Sequence: Synthetic peptide
RTFSDDTMG

SEQ ID NO: 462 - protein, 9 aa, Artificial Sequence
  Description of Artificial Sequence: Synthetic peptide
RTFGDYAMG

SEQ ID NO: 463 - protein, 9 aa, Artificial Sequence
  Description of Artificial Sequence: Synthetic peptide
RTFGDDTMG

SEQ ID NO: 464 - protein, 9 aa, Artificial Sequence
  Description of Artificial Sequence: Synthetic peptide
RTFGDYIMG

SEQ ID NO: 465 - protein, 9 aa, Artificial Sequence
  Description of Artificial Sequence: Synthetic peptide
RTFGDYIMG

SEQ ID NO: 466 - protein, 9 aa, Artificial Sequence
  Description of Artificial Sequence: Synthetic peptide
RTFSDDTMG

SEQ ID NO: 467 - protein, 9 aa, Artificial Sequence
  Description of Artificial Sequence: Synthetic peptide
RTFGDYIMG

SEQ ID NO: 468 - protein, 9 aa, Artificial Sequence
  Description of Artificial Sequence: Synthetic peptide
RTFSDDTMG

SEQ ID NO: 469 - protein, 9 aa, Artificial Sequence
  Description of Artificial Sequence: Synthetic peptide
RTFSDYTMG

SEQ ID NO: 470 - protein, 9 aa, Artificial Sequence
  Description of Artificial Sequence: Synthetic peptide
RTFGDDTMG

SEQ ID NO: 471 - protein, 9 aa, Artificial Sequence
  Description of Artificial Sequence: Synthetic peptide
FAFGDNWIG

SEQ ID NO: 472 - protein, 9 aa, Artificial Sequence
  Description of Artificial Sequence: Synthetic peptide
RTFSDDAMG

SEQ ID NO: 473 - protein, 9 aa, Artificial Sequence
  Description of Artificial Sequence: Synthetic peptide
RTFSDDTMG

SEQ ID NO: 474 - protein, 9 aa, Artificial Sequence
  Description of Artificial Sequence: Synthetic peptide
RTFSDDTMG

SEQ ID NO: 475 - protein, 9 aa, Artificial Sequence
  Description of Artificial Sequence: Synthetic peptide
RTFGDDTMG

SEQ ID NO: 476 - protein, 9 aa, Artificial Sequence
  Description of Artificial Sequence: Synthetic peptide
RTFGDYIMG

SEQ ID NO: 477 - protein, 9 aa, Artificial Sequence
  Description of Artificial Sequence: Synthetic peptide
RTFSDDAMG

SEQ ID NO: 478 - protein, 9 aa, Artificial Sequence
  Description of Artificial Sequence: Synthetic peptide
RTFGDYIMG

SEQ ID NO: 479 - protein, 9 aa, Artificial Sequence
  Description of Artificial Sequence: Synthetic peptide
RTFGDDTMG

SEQ ID NO: 480 - protein, 9 aa, Artificial Sequence
  Description of Artificial Sequence: Synthetic peptide
RTFSDDTMG

SEQ ID NO: 481 - protein, 9 aa, Artificial Sequence
  Description of Artificial Sequence: Synthetic peptide
RTFGDYIMG

SEQ ID NO: 482 - protein, 9 aa, Artificial Sequence
  Description of Artificial Sequence: Synthetic peptide
FTFGDYVMG

SEQ ID NO: 483 - protein, 9 aa, Artificial Sequence
  Description of Artificial Sequence: Synthetic peptide
RTFGDYTMG

SEQ ID NO: 484 - protein, 9 aa, Artificial Sequence
  Description of Artificial Sequence: Synthetic peptide
RTFGDYIMG

SEQ ID NO: 485 - protein, 9 aa, Artificial Sequence
  Description of Artificial Sequence: Synthetic peptide
RTFGDYIMG

SEQ ID NO: 486 - protein, 9 aa, Artificial Sequence
  Description of Artificial Sequence: Synthetic peptide
RTFGDYIMG

SEQ ID NO: 487 - protein, 9 aa, Artificial Sequence
  Description of Artificial Sequence: Synthetic peptide
RTFGDYIMG

SEQ ID NO: 488 - protein, 9 aa, Artificial Sequence
  Description of Artificial Sequence: Synthetic peptide
FTWGDYTMG

SEQ ID NO: 489 - protein, 9 aa, Artificial Sequence
  Description of Artificial Sequence: Synthetic peptide
IPSTLRAMG

SEQ ID NO: 490 - protein, 10 aa, Artificial Sequence
  Description of Artificial Sequence: Synthetic peptide
FSFDDDYVMG

SEQ ID NO: 491 - protein, 9 aa, Artificial Sequence
  Description of Artificial Sequence: Synthetic peptide
RTFSNAAMG

SEQ ID NO: 492 - protein, 9 aa, Artificial Sequence
  Description of Artificial Sequence: Synthetic peptide
GTFGVYHMG

SEQ ID NO: 493 - protein, 9 aa, Artificial Sequence
  Description of Artificial Sequence: Synthetic peptide
FTFSSYYMG

SEQ ID NO: 494 - protein, 9 aa, Artificial Sequence
  Description of Artificial Sequence: Synthetic peptide
RTFSGDFMG

SEQ ID NO: 495 - protein, 9 aa, Artificial Sequence
  Description of Artificial Sequence: Synthetic peptide
STLRDYAMG

SEQ ID NO: 496 - protein, 9 aa, Artificial Sequence
  Description of Artificial Sequence: Synthetic peptide
FTFDDYTMG

SEQ ID NO: 497 - protein, 9 aa, Artificial Sequence
  Description of Artificial Sequence: Synthetic peptide
GTFSSYGMG

SEQ ID NO: 498 - protein, 10 aa, Artificial Sequence
  Description of Artificial Sequence: Synthetic peptide
FSFDDDYVMG

SEQ ID NO: 499 - protein, 10 aa, Artificial Sequence
  Description of Artificial Sequence: Synthetic peptide
FSFDDDYVMG

SEQ ID NO: 500 - protein, 9 aa, Artificial Sequence
  Description of Artificial Sequence: Synthetic peptide
NIAAINVMG

SEQ ID NO: 501 - protein, 9 aa, Artificial Sequence
  Description of Artificial Sequence: Synthetic peptide
IITSRYVMG

SEQ ID NO: 502 - protein, 10 aa, Artificial Sequence
  Description of Artificial Sequence: Synthetic peptide
FSFDDDYVMG

SEQ ID NO: 503 - protein, 9 aa, Artificial Sequence
  Description of Artificial Sequence: Synthetic peptide
SISSINVMG

SEQ ID NO: 504 - protein, 9 aa, Artificial Sequence
  Description of Artificial Sequence: Synthetic peptide
LTFILYRMG

SEQ ID NO: 505 - protein, 9 aa, Artificial Sequence
  Description of Artificial Sequence: Synthetic peptide
GTFSVYHMG

SEQ ID NO: 506 - protein, 9 aa, Artificial Sequence
  Description of Artificial Sequence: Synthetic peptide
RAFSTYGMG

SEQ ID NO: 507 - protein, 9 aa, Artificial Sequence
  Description of Artificial Sequence: Synthetic peptide
RTFSDIAMG

SEQ ID NO: 508 - protein, 9 aa, Artificial Sequence
  Description of Artificial Sequence: Synthetic peptide
RTFSSARMG

SEQ ID NO: 509 - protein, 9 aa, Artificial Sequence
  Description of Artificial Sequence: Synthetic peptide
FAFSSYAMG

SEQ ID NO: 510 - protein, 9 aa, Artificial Sequence
  Description of Artificial Sequence: Synthetic peptide
ITFRRHDMG

SEQ ID NO: 511 - protein, 9 aa, Artificial Sequence
  Description of Artificial Sequence: Synthetic peptide
TAASFNPMG

SEQ ID NO: 512 - protein, 9 aa, Artificial Sequence
  Description of Artificial Sequence: Synthetic peptide
NINIINYMG

SEQ ID NO: 513 - protein, 9 aa, Artificial Sequence
  Description of Artificial Sequence: Synthetic peptide
FTFDDYAMG

SEQ ID NO: 514 - protein, 9 aa, Artificial Sequence
  Description of Artificial Sequence: Synthetic peptide
NIFTRNVMG

SEQ ID NO: 515 - protein, 9 aa, Artificial Sequence
  Description of Artificial Sequence: Synthetic peptide
RTFSSIAMG

SEQ ID NO: 516 - protein, 9 aa, Artificial Sequence
  Description of Artificial Sequence: Synthetic peptide
IPSTLRAMG

SEQ ID NO: 517 - protein, 9 aa, Artificial Sequence
  Description of Artificial Sequence: Synthetic peptide
FTLDDSAMG

SEQ ID NO: 518 - protein, 9 aa, Artificial Sequence
  Description of Artificial Sequence: Synthetic peptide
SISSFNAMG

SEQ ID NO: 519 - protein, 9 aa, Artificial Sequence
  Description of Artificial Sequence: Synthetic peptide
NIFSDNIIG

SEQ ID NO: 520 - protein, 9 aa, Artificial Sequence
  Description of Artificial Sequence: Synthetic peptide
SISSIGAMG

SEQ ID NO: 521 - protein, 9 aa, Artificial Sequence
  Description of Artificial Sequence: Synthetic peptide
FTFDDYGMG

SEQ ID NO: 522 - protein, 9 aa, Artificial Sequence
  Description of Artificial Sequence: Synthetic peptide
RTFSNYTMG

SEQ ID NO: 523 - protein, 6 aa, Artificial Sequence
  Description of Artificial Sequence: Synthetic peptide
STNYMG

SEQ ID NO: 524 - protein, 9 aa, Artificial Sequence
  Description of Artificial Sequence: Synthetic peptide
GTFSSVGMG

SEQ ID NO: 525 - protein, 9 aa, Artificial Sequence
  Description of Artificial Sequence: Synthetic peptide
RIFTNTAMG

SEQ ID NO: 526 - protein, 9 aa, Artificial Sequence
  Description of Artificial Sequence: Synthetic peptide
EEFSDHWMG

SEQ ID NO: 527 - protein, 9 aa, Artificial Sequence
  Description of Artificial Sequence: Synthetic peptide
RTFSSIAMG

SEQ ID NO: 528 - protein, 9 aa, Artificial Sequence
  Description of Artificial Sequence: Synthetic peptide
STSSLRTMG

SEQ ID NO: 529 - protein, 10 aa, Artificial Sequence
  Description of Artificial Sequence: Synthetic peptide
GGTFGSYAMG

SEQ ID NO: 530 - protein, 9 aa, Artificial Sequence
  Description of Artificial Sequence: Synthetic peptide
RTFSNAAMG

SEQ ID NO: 531 - protein, 9 aa, Artificial Sequence
  Description of Artificial Sequence: Synthetic peptide
IILSDNAMG

SEQ ID NO: 532 - protein, 9 aa, Artificial Sequence
  Description of Artificial Sequence: Synthetic peptide
RTFGDYIMG

SEQ ID NO: 533 - protein, 9 aa, Artificial Sequence
  Description of Artificial Sequence: Synthetic peptide
FNFNWYPMG

SEQ ID NO: 534 - protein, 9 aa, Artificial Sequence
  Description of Artificial Sequence: Synthetic peptide
SIRSVSVMG

SEQ ID NO: 535 - protein, 9 aa, Artificial Sequence
  Description of Artificial Sequence: Synthetic peptide
MTFRLYAMG

SEQ ID NO: 536 - protein, 9 aa, Artificial Sequence
  Description of Artificial Sequence: Synthetic peptide
RTFSDDAMG

SEQ ID NO: 537 - protein, 9 aa, Artificial Sequence
  Description of Artificial Sequence: Synthetic peptide
GTFSVYAMG

SEQ ID NO: 538 - protein, 9 aa, Artificial Sequence
  Description of Artificial Sequence: Synthetic peptide
FALGYYAMG

SEQ ID NO: 539 - protein, 9 aa, Artificial Sequence
  Description of Artificial Sequence: Synthetic peptide
FNLDDYAMG

SEQ ID NO: 540 - protein, 9 aa, Artificial Sequence
  Description of Artificial Sequence: Synthetic peptide
NTFSGGFMG

SEQ ID NO: 541 - protein, 9 aa, Artificial Sequence
  Description of Artificial Sequence: Synthetic peptide
SIRSINIMG

SEQ ID NO: 542 - protein, 9 aa, Artificial Sequence
  Description of Artificial Sequence: Synthetic peptide
GTFSSIGMG

SEQ ID NO: 543 - protein, 9 aa, Artificial Sequence
  Description of Artificial Sequence: Synthetic peptide
LRFDDYAMG

SEQ ID NO: 544 - protein, 9 aa, Artificial Sequence
  Description of Artificial Sequence: Synthetic peptide
SIFSIDVMG

SEQ ID NO: 545 - protein, 9 aa, Artificial Sequence
  Description of Artificial Sequence: Synthetic peptide
FTLADYAMG

SEQ ID NO: 546 - protein, 9 aa, Artificial Sequence
  Description of Artificial Sequence: Synthetic peptide
RTFSSIAMG

SEQ ID NO: 547 - protein, 10 aa, Artificial Sequence
  Description of Artificial Sequence: Synthetic peptide
PTFSSYAMMG

SEQ ID NO: 548 - protein, 6 aa, Artificial Sequence
  Description of Artificial Sequence: Synthetic peptide
STGYMG

SEQ ID NO: 549 - protein, 9 aa, Artificial Sequence
  Description of Artificial Sequence: Synthetic peptide
RPFSEYTMG

SEQ ID NO: 550 - protein, 9 aa, Artificial Sequence
  Description of Artificial Sequence: Synthetic peptide
LTLSTYGMG

SEQ ID NO: 551 - protein, 9 aa, Artificial Sequence
  Description of Artificial Sequence: Synthetic peptide
FTFNNHNMG

SEQ ID NO: 552 - protein, 7 aa, Artificial Sequence
  Description of Artificial Sequence: Synthetic peptide
GIYRVMG

SEQ ID NO: 553 - protein, 9 aa, Artificial Sequence
  Description of Artificial Sequence: Synthetic peptide
YTDSNLWMG

SEQ ID NO: 554 - protein, 9 aa, Artificial Sequence
  Description of Artificial Sequence: Synthetic peptide
FTFDYYTMG

SEQ ID NO: 555 - protein, 9 aa, Artificial Sequence
  Description of Artificial Sequence: Synthetic peptide
GIFSINVMG

SEQ ID NO: 556 - protein, 9 aa, Artificial Sequence
  Description of Artificial Sequence: Synthetic peptide
FTFDGAAMG

SEQ ID NO: 557 - protein, 9 aa, Artificial Sequence
  Description of Artificial Sequence: Synthetic peptide
RTHSIYPMG

SEQ ID NO: 558 - protein, 9 aa, Artificial Sequence
  Description of Artificial Sequence: Synthetic peptide
PTFSIYAMG

SEQ ID NO: 559 - protein, 11 aa, Artificial Sequence
  Description of Artificial Sequence: Synthetic peptide
LTFDDNIHVMG

SEQ ID NO: 560 - protein, 9 aa, Artificial Sequence
  Description of Artificial Sequence: Synthetic peptide
LTLDYYAMG

SEQ ID NO: 561 - protein, 9 aa, Artificial Sequence
  Description of Artificial Sequence: Synthetic peptide
RTIVPYTMG

SEQ ID NO: 562 - protein, 9 aa, Artificial Sequence
  Description of Artificial Sequence: Synthetic peptide
GTFTTYHMG

SEQ ID NO: 563 - protein, 9 aa, Artificial Sequence
  Description of Artificial Sequence: Synthetic peptide
FTFNVFAMG

SEQ ID NO: 564 - protein, 9 aa, Artificial Sequence
  Description of Artificial Sequence: Synthetic peptide
SIFSIDVMG

SEQ ID NO: 565 - protein, 9 aa, Artificial Sequence
  Description of Artificial Sequence: Synthetic peptide
FTFSSYSMG

SEQ ID NO: 566 - protein, 9 aa, Artificial Sequence
  Description of Artificial Sequence: Synthetic peptide
NTFSINVMG

SEQ ID NO: 567 - protein, 9 aa, Artificial Sequence
  Description of Artificial Sequence: Synthetic peptide
RTISSYIMG

SEQ ID NO: 568 - protein, 9 aa, Artificial Sequence
  Description of Artificial Sequence: Synthetic peptide
RANSINWMG

SEQ ID NO: 569 - protein, 9 aa, Artificial Sequence
  Description of Artificial Sequence: Synthetic peptide
GTFSVFAMG

SEQ ID NO: 570 - protein, 9 aa, Artificial Sequence
  Description of Artificial Sequence: Synthetic peptide
FTFDDYPMG

SEQ ID NO: 571 - protein, 9 aa, Artificial Sequence
  Description of Artificial Sequence: Synthetic peptide
FALGYYAMG

SEQ ID NO: 572 - protein, 9 aa, Artificial Sequence
  Description of Artificial Sequence: Synthetic peptide
RTLDIHVMG

SEQ ID NO: 573 - protein, 9 aa, Artificial Sequence
  Description of Artificial Sequence: Synthetic peptide
FTPDNYAMG

SEQ ID NO: 574 - protein, 9 aa, Artificial Sequence
  Description of Artificial Sequence: Synthetic peptide
FTFDDYAMG

SEQ ID NO: 575 - protein, 9 aa, Artificial Sequence
  Description of Artificial Sequence: Synthetic peptide
RTFSRYIMG

SEQ ID NO: 576 - protein, 9 aa, Artificial Sequence
  Description of Artificial Sequence: Synthetic peptide
PTFSIYAMG

SEQ ID NO: 577 - protein, 9 aa, Artificial Sequence
  Description of Artificial Sequence: Synthetic peptide
RTFSLNAMG

SEQ ID NO: 578 - protein, 9 aa, Artificial Sequence
  Description of Artificial Sequence: Synthetic peptide
STFSINAMG

SEQ ID NO: 579 - protein, 9 aa, Artificial Sequence
  Description of Artificial Sequence: Synthetic peptide
RTFSMHAMG

SEQ ID NO: 580 - protein, 9 aa, Artificial Sequence
  Description of Artificial Sequence: Synthetic peptide
VTLDLYAMG

SEQ ID NO: 581 - protein, 9 aa, Artificial Sequence
  Description of Artificial Sequence: Synthetic peptide
LPFTINVMG

SEQ ID NO: 582 - protein, 9 aa, Artificial Sequence
  Description of Artificial Sequence: Synthetic peptide
RAFSNYAMG

SEQ ID NO: 583 - protein, 9 aa, Artificial Sequence
  Description of Artificial Sequence: Synthetic peptide
FTPDDYAMG

SEQ ID NO: 584 - protein, 9 aa, Artificial Sequence
  Description of Artificial Sequence: Synthetic peptide
FTLNYYGMG

SEQ ID NO: 585 - protein, 9 aa, Artificial Sequence
  Description of Artificial Sequence: Synthetic peptide
LPFSTKSMG

SEQ ID NO: 586 - protein, 9 aa, Artificial Sequence
  Description of Artificial Sequence: Synthetic peptide
RTFSINAMG

SEQ ID NO: 587 - protein, 9 aa, Artificial Sequence
  Description of Artificial Sequence: Synthetic peptide
EEFSDHWMG

SEQ ID NO: 588 - protein, 9 aa, Artificial Sequence
  Description of Artificial Sequence: Synthetic peptide
FTFGSYDMG

SEQ ID NO: 589 - protein, 9 aa, Artificial Sequence
  Description of Artificial Sequence: Synthetic peptide
LPLDLYAMG

SEQ ID NO: 590 - protein, 9 aa, Artificial Sequence
  Description of Artificial Sequence: Synthetic peptide
RTSTVNGMG

SEQ ID NO: 591 - protein, 9 aa, Artificial Sequence
  Description of Artificial Sequence: Synthetic peptide
FSLDYYGMG

SEQ ID NO: 592 - protein, 9 aa, Artificial Sequence
  Description of Artificial Sequence: Synthetic peptide
RPNSINWMG

SEQ ID NO: 593 - protein, 9 aa, Artificial Sequence
  Description of Artificial Sequence: Synthetic peptide
EKFSDHWMG

SEQ ID NO: 594 - protein, 9 aa, Artificial Sequence
  Description of Artificial Sequence: Synthetic peptide
LTVVPYAMG

SEQ ID NO: 595 - protein, 9 aa, Artificial Sequence
  Description of Artificial Sequence: Synthetic peptide
TTFNFNVMG

SEQ ID NO: 596 - protein, 9 aa, Artificial Sequence
  Description of Artificial Sequence: Synthetic peptide
IDVNRNAMG

SEQ ID NO: 597 - protein, 8 aa, Artificial Sequence
  Description of Artificial Sequence: Synthetic peptide
RTFSSNMG

SEQ ID NO: 598 - protein, 9 aa, Artificial Sequence
  Description of Artificial Sequence: Synthetic peptide
GTFSMGWIR

SEQ ID NO: 599 - protein, 9 aa, Artificial Sequence
  Description of Artificial Sequence: Synthetic peptide
CTLDYYAMG

SEQ ID NO: 600 - protein, 9 aa, Artificial Sequence
  Description of Artificial Sequence: Synthetic peptide
LTFSLYRMC

SEQ ID NO: 601 - protein, 9 aa, Artificial Sequence
  Description of Artificial Sequence: Synthetic peptide
RSFSSHRMG

SEQ ID NO: 602 - protein, 9 aa, Artificial Sequence
  Description of Artificial Sequence: Synthetic peptide
RIIVPNTMG

SEQ ID NO: 603 - protein, 8 aa, Artificial Sequence
  Description of Artificial Sequence: Synthetic peptide
SIFIISMG

SEQ ID NO: 604 - protein, 9 aa, Artificial Sequence
  Description of Artificial Sequence: Synthetic peptide
FSLDYYDMG

SEQ ID NO: 605 - protein, 9 aa, Artificial Sequence
  Description of Artificial Sequence: Synthetic peptide
TSISNRVMG

SEQ ID NO: 606 - protein, 9 aa, Artificial Sequence
  Description of Artificial Sequence: Synthetic peptide
NIDRLYAMG

SEQ ID NO: 607 - protein, 9 aa, Artificial Sequence
  Description of Artificial Sequence: Synthetic peptide
NTFTINVMG

SEQ ID NO: 608 - protein, 9 aa, Artificial Sequence
  Description of Artificial Sequence: Synthetic peptide
FNVNDYAMG

SEQ ID NO: 609 - protein, 9 aa, Artificial Sequence
  Description of Artificial Sequence: Synthetic peptide
FTFDHYTMG

SEQ ID NO: 610 - protein, 9 aa, Artificial Sequence
  Description of Artificial Sequence: Synthetic peptide
RTFGNYNMG

SEQ ID NO: 611 - protein, 9 aa, Artificial Sequence
  Description of Artificial Sequence: Synthetic peptide
FTMSSSWMG

SEQ ID NO: 612 - protein, 9 aa, Artificial Sequence
  Description of Artificial Sequence: Synthetic peptide
FTFSPSWMG

SEQ ID NO: 613 - protein, 9 aa, Artificial Sequence
  Description of Artificial Sequence: Synthetic peptide
FTRDYYTMG

SEQ ID NO: 614 - protein, 6 aa, Artificial Sequence
  Description of Artificial Sequence: Synthetic peptide
RTFTMG

SEQ ID NO: 615 - protein, 9 aa, Artificial Sequence
  Description of Artificial Sequence: Synthetic peptide
TTLDYYAMG

SEQ ID NO: 616 - protein, 9 aa, Artificial Sequence
  Description of Artificial Sequence: Synthetic peptide
FTFSSYWMG

SEQ ID NO: 617 - protein, 9 aa, Artificial Sequence
  Description of Artificial Sequence: Synthetic peptide
FTLSGIWMG

SEQ ID NO: 618 - protein, 9 aa, Artificial Sequence
  Description of Artificial Sequence: Synthetic peptide
FTFDYYAMG

SEQ ID NO: 619 - protein, 9 aa, Artificial Sequence
  Description of Artificial Sequence: Synthetic peptide
SIASIHAMG

SEQ ID NO: 620 - protein, 9 aa, Artificial Sequence
  Description of Artificial Sequence: Synthetic peptide
LAFNAYAMG

SEQ ID NO: 621 - protein, 9 aa, Artificial Sequence
  Description of Artificial Sequence: Synthetic peptide
STYTTYSMG

SEQ ID NO: 622 - protein, 9 aa, Artificial Sequence
  Description of Artificial Sequence: Synthetic peptide
LTFNDYAMG

SEQ ID NO: 623 - protein, 9 aa, Artificial Sequence
  Description of Artificial Sequence: Synthetic peptide
ITFRFKAMG

SEQ ID NO: 624 - protein, 9 aa, Artificial Sequence
  Description of Artificial Sequence: Synthetic peptide
STVLINAMG

SEQ ID NO: 625 - protein, 9 aa, Artificial Sequence
  Description of Artificial Sequence: Synthetic peptide
FTFDDAAMG

SEQ ID NO: 626 - protein, 9 aa, Artificial Sequence
  Description of Artificial Sequence: Synthetic peptide
NTGSTGYMG

SEQ ID NO: 627 - protein, 9 aa, Artificial Sequence
  Description of Artificial Sequence: Synthetic peptide
LTFRNYAMG

SEQ ID NO: 628 - protein, 9 aa, Artificial Sequence
  Description of Artificial Sequence: Synthetic peptide
SILSIAVMG

SEQ ID NO: 629 - protein, 9 aa, Artificial Sequence
  Description of Artificial Sequence: Synthetic peptide
STLPYHAMG

SEQ ID NO: 630 - protein, 9 aa, Artificial Sequence
  Description of Artificial Sequence: Synthetic peptide
TLFKINAMG

SEQ ID NO: 631 - protein, 9 aa, Artificial Sequence
  Description of Artificial Sequence: Synthetic peptide
RTFSEVVMG

SEQ ID NO: 632 - protein, 9 aa, Artificial Sequence
  Description of Artificial Sequence: Synthetic peptide
SIFSMNTMG

SEQ ID NO: 633 - protein, 9 aa, Artificial Sequence
  Description of Artificial Sequence: Synthetic peptide
FTLDYYAMG

SEQ ID NO: 634 - protein, 9 aa, Artificial Sequence
  Description of Artificial Sequence: Synthetic peptide
LTFGTYTMG

SEQ ID NO: 635 - protein, 9 aa, Artificial Sequence
  Description of Artificial Sequence: Synthetic peptide
DTFSTSWMG

SEQ ID NO: 636 - protein, 9 aa, Artificial Sequence
  Description of Artificial Sequence: Synthetic peptide
ITFRFKAMG

SEQ ID NO: 637 - protein, 9 aa, Artificial Sequence
  Description of Artificial Sequence: Synthetic peptide
DTYGSYWMG

SEQ ID NO: 638 - protein, 10 aa, Artificial Sequence
  Description of Artificial Sequence: Synthetic peptide
YTLKNYYAMG

SEQ ID NO: 639 - protein, 9 aa, Artificial Sequence
  Description of Artificial Sequence: Synthetic peptide
FAFGDSWMG

SEQ ID NO: 640 - protein, 9 aa, Artificial Sequence
  Description of Artificial Sequence: Synthetic peptide
DTFSANRMG

SEQ ID NO: 641 - protein, 9 aa, Artificial Sequence
  Description of Artificial Sequence: Synthetic peptide
FTLDYYDMG

SEQ ID NO: 642 - protein, 9 aa, Artificial Sequence
  Description of Artificial Sequence: Synthetic peptide
TFQRINHMG

SEQ ID NO: 643 - protein, 9 aa, Artificial Sequence
  Description of Artificial Sequence: Synthetic peptide
SAFRSNAMG

SEQ ID NO: 644 - protein, 9 aa, Artificial Sequence
  Description of Artificial Sequence: Synthetic peptide
FTLAYYAMG

SEQ ID NO: 645 - protein, 9 aa, Artificial Sequence
  Description of Artificial Sequence: Synthetic peptide
FDFSVSWMG

SEQ ID NO: 646 - protein, 9 aa, Artificial Sequence
  Description of Artificial Sequence: Synthetic peptide
HTFSTSWMG

SEQ ID NO: 647 - protein, 9 aa, Artificial Sequence
  Description of Artificial Sequence: Synthetic peptide
NTFSGGFMG

SEQ ID NO: 648 - protein, 9 aa, Artificial Sequence
  Description of Artificial Sequence: Synthetic peptide
FTFSPSWMG

SEQ ID NO: 649 - protein, 9 aa, Artificial Sequence
  Description of Artificial Sequence: Synthetic peptide
FTFSDYWMG

SEQ ID NO: 650 - protein, 9 aa, Artificial Sequence
  Description of Artificial Sequence: Synthetic peptide
FTFSTSWMG

SEQ ID NO: 651 - protein, 9 aa, Artificial Sequence
  Description of Artificial Sequence: Synthetic peptide
DTYGSYWMG

SEQ ID NO: 652 - protein, 10 aa, Artificial Sequence
  Description of Artificial Sequence: Synthetic peptide
RTFSSYAMMG

SEQ ID NO: 653 - protein, 9 aa, Artificial Sequence
  Description of Artificial Sequence: Synthetic peptide
GTFGVYHMG

SEQ ID NO: 654 - protein, 9 aa, Artificial Sequence
  Description of Artificial Sequence: Synthetic peptide
NMFSINAMG

SEQ ID NO: 655 - protein, 7 aa, Artificial Sequence
  Description of Artificial Sequence: Synthetic peptide
LTFSAMG

SEQ ID NO: 656 - protein, 9 aa, Artificial Sequence
  Description of Artificial Sequence: Synthetic peptide
RTFSMHAMG

SEQ ID NO: 657 - protein, 9 aa, Artificial Sequence
  Description of Artificial Sequence: Synthetic peptide
FTVSNYAMG

SEQ ID NO: 658 - protein, 9 aa, Artificial Sequence
  Description of Artificial Sequence: Synthetic peptide
STVLINAMG

SEQ ID NO: 659 - protein, 9 aa, Artificial Sequence
  Description of Artificial Sequence: Synthetic peptide
FSFDRWAMG

SEQ ID NO: 660 - protein, 9 aa, Artificial Sequence
  Description of Artificial Sequence: Synthetic peptide
YTYSSYVMG

SEQ ID NO: 661 - protein, 9 aa, Artificial Sequence
  Description of Artificial Sequence: Synthetic peptide
DTYGSYWMG

SEQ ID NO: 662 - protein, 9 aa, Artificial Sequence
  Description of Artificial Sequence: Synthetic peptide
ISINTNVMG

SEQ ID NO: 663 - protein, 9 aa, Artificial Sequence
  Description of Artificial Sequence: Synthetic peptide
FEFENHWMG

SEQ ID NO: 664 - protein, 9 aa, Artificial Sequence
  Description of Artificial Sequence: Synthetic peptide
FTMSSSWMG

SEQ ID NO: 665 - protein, 8 aa, Artificial Sequence
  Description of Artificial Sequence: Synthetic peptide
NIFRSNMG

SEQ ID NO: 666 - protein, 9 aa, Artificial Sequence
  Description of Artificial Sequence: Synthetic peptide
LTFDDHSMG

SEQ ID NO: 667 - protein, 9 aa, Artificial Sequence
  Description of Artificial Sequence: Synthetic peptide
RAVSTYAMG

SEQ ID NO: 668 - protein, 12 aa, Artificial Sequence
  Description of Artificial Sequence: Synthetic peptide
ISGSVFSRTPMG

SEQ ID NO: 669 - protein, 9 aa, Artificial Sequence
  Description of Artificial Sequence: Synthetic peptide
DTYGSYWMG

SEQ ID NO: 670 - protein, 9 aa, Artificial Sequence
  Description of Artificial Sequence: Synthetic peptide
DTYGSYWMG

SEQ ID NO: 671 - protein, 9 aa, Artificial Sequence
  Description of Artificial Sequence: Synthetic peptide
STFSGNWMG

SEQ ID NO: 672 - protein, 6 aa, Artificial Sequence
  Description of Artificial Sequence: Synthetic peptide
QTFNMG

SEQ ID NO: 673 - protein, 8 aa, Artificial Sequence
  Description of Artificial Sequence: Synthetic peptide
IPSIHAMG

SEQ ID NO: 674 - protein, 9 aa, Artificial Sequence
  Description of Artificial Sequence: Synthetic peptide
LPFSTLHMG

SEQ ID NO: 675 - protein, 9 aa, Artificial Sequence
  Description of Artificial Sequence: Synthetic peptide
LTFSLFAMG

SEQ ID NO: 676 - protein, 8 aa, Artificial Sequence
  Description of Artificial Sequence: Synthetic peptide
SFSNYAMG

SEQ ID NO: 677 - protein, 9 aa, Artificial Sequence
  Description of Artificial Sequence: Synthetic peptide
FTLSDRAMG

SEQ ID NO: 678 - protein, 9 aa, Artificial Sequence
  Description of Artificial Sequence: Synthetic peptide
GTFSSVGMG

SEQ ID NO: 679 - protein, 10 aa, Artificial Sequence
  Description of Artificial Sequence: Synthetic peptide
FNLDDYADMG

SEQ ID NO: 680 - protein, 9 aa, Artificial Sequence
  Description of Artificial Sequence: Synthetic peptide
ITFSNDAMG

SEQ ID NO: 681 - protein, 9 aa, Artificial Sequence
  Description of Artificial Sequence: Synthetic peptide
STLSINAMG

SEQ ID NO: 682 - protein, 9 aa, Artificial Sequence
  Description of Artificial Sequence: Synthetic peptide
HTFSGYAMG

SEQ ID NO: 683 - protein, 9 aa, Artificial Sequence
  Description of Artificial Sequence: Synthetic peptide
FAFGDSWMG

SEQ ID NO: 684 - protein, 9 aa, Artificial Sequence
  Description of Artificial Sequence: Synthetic peptide
GTFSTYWMG

SEQ ID NO: 685 - protein, 9 aa, Artificial Sequence
  Description of Artificial Sequence: Synthetic peptide
LAFDFDGMG

SEQ ID NO: 686 - protein, 9 aa, Artificial Sequence
  Description of Artificial Sequence: Synthetic peptide
FTFDRSWMG

SEQ ID NO: 687 - protein, 7 aa, Artificial Sequence
  Description of Artificial Sequence: Synthetic peptide
RTYDAMG

SEQ ID NO: 688 - protein, 9 aa, Artificial Sequence
  Description of Artificial Sequence: Synthetic peptide
SISSIDYMG

SEQ ID NO: 689 - protein, 9 aa, Artificial Sequence
  Description of Artificial Sequence: Synthetic peptide
GTFSFYNMG

SEQ ID NO: 690 - protein, 9 aa, Artificial Sequence
  Description of Artificial Sequence: Synthetic peptide
FIGNYHAMG

SEQ ID NO: 691 - protein, 9 aa, Artificial Sequence
  Description of Artificial Sequence: Synthetic peptide
SSLDAYGMG

SEQ ID NO: 692 - protein, 9 aa, Artificial Sequence
  Description of Artificial Sequence: Synthetic peptide
SIASIHAMG

SEQ ID NO: 693 - protein, 9 aa, Artificial Sequence
  Description of Artificial Sequence: Synthetic peptide
FTPDDYAMG

SEQ ID NO: 694 - protein, 9 aa, Artificial Sequence
  Description of Artificial Sequence: Synthetic peptide
GTFSVFAMG

SEQ ID NO: 695 - protein, 9 aa, Artificial Sequence
  Description of Artificial Sequence: Synthetic peptide
PISGINRMG

SEQ ID NO: 696 - protein, 9 aa, Artificial Sequence
  Description of Artificial Sequence: Synthetic peptide
TSIMVGAMG

SEQ ID NO: 697 - protein, 9 aa, Artificial Sequence
  Description of Artificial Sequence: Synthetic peptide
RTFSTHWMG

SEQ ID NO: 698 - protein, 8 aa, Artificial Sequence
  Description of Artificial Sequence: Synthetic peptide
TIFASAMG

SEQ ID NO: 699 - protein, 9 aa, Artificial Sequence
  Description of Artificial Sequence: Synthetic peptide
FPFSIWPMG

SEQ ID NO: 700 - protein, 9 aa, Artificial Sequence
  Description of Artificial Sequence: Synthetic peptide
RTFGNYAMG

SEQ ID NO: 701 - protein, 10 aa, Artificial Sequence
  Description of Artificial Sequence: Synthetic peptide
FLFDSYASMG

SEQ ID NO: 702 - protein, 9 aa, Artificial Sequence
  Description of Artificial Sequence: Synthetic peptide
LPFSTKSMG

SEQ ID NO: 703 - protein, 9 aa, Artificial Sequence
  Description of Artificial Sequence: Synthetic peptide
NIFRIETMG

SEQ ID NO: 704 - protein, 9 aa, Artificial Sequence
  Description of Artificial Sequence: Synthetic peptide
IPSSIRAMG

SEQ ID NO: 705 - protein, 9 aa, Artificial Sequence
  Description of Artificial Sequence: Synthetic peptide
FTLSGNWMG

SEQ ID NO: 706 - protein, 9 aa, Artificial Sequence
  Description of Artificial Sequence: Synthetic peptide
FTFSSLAMG

SEQ ID NO: 707 - protein, 8 aa, Artificial Sequence
  Description of Artificial Sequence: Synthetic peptide
TFGHYAMG

SEQ ID NO: 708 - protein, 9 aa, Artificial Sequence
  Description of Artificial Sequence: Synthetic peptide
IPFRSRTMG

SEQ ID NO: 709 - protein, 9 aa, Artificial Sequence
  Description of Artificial Sequence: Synthetic peptide
GTFSTSWMG

SEQ ID NO: 710 - protein, 9 aa, Artificial Sequence
  Description of Artificial Sequence: Synthetic peptide
GTFSLFAMG

SEQ ID NO: 711 - protein, 9 aa, Artificial Sequence
  Description of Artificial Sequence: Synthetic peptide
SSFSAYAMG

SEQ ID NO: 712 - protein, 9 aa, Artificial Sequence
  Description of Artificial Sequence: Synthetic peptide
RTSSPIAMG

SEQ ID NO: 713 - protein, 9 aa, Artificial Sequence
  Description of Artificial Sequence: Synthetic peptide
LTFNQYTMG

SEQ ID NO: 714 - protein, 7 aa, Artificial Sequence
  Description of Artificial Sequence: Synthetic peptide
PTFSSMG

SEQ ID NO: 715 - protein, 9 aa, Artificial Sequence
  Description of Artificial Sequence: Synthetic peptide
IPSTLRAMG

SEQ ID NO: 716 - protein, 10 aa, Artificial Sequence
  Description of Artificial Sequence: Synthetic peptide
GVGFSVTNMG

SEQ ID NO: 717 - protein, 9 aa, Artificial Sequence
  Description of Artificial Sequence: Synthetic peptide
GTFGSYGMG

SEQ ID NO: 718 - protein, 9 aa, Artificial Sequence
  Description of Artificial Sequence: Synthetic peptide
GTFSTYAMG

SEQ ID NO: 719 - protein, 9 aa, Artificial Sequence
  Description of Artificial Sequence: Synthetic peptide
PIYAVNRMG

SEQ ID NO: 720 - protein, 9 aa, Artificial Sequence
  Description of Artificial Sequence: Synthetic peptide
FTFSNYWMG

SEQ ID NO: 721 - protein, 9 aa, Artificial Sequence
  Description of Artificial Sequence: Synthetic peptide
GTFSAYHMG

SEQ ID NO: 722 - protein, 9 aa, Artificial Sequence
  Description of Artificial Sequence: Synthetic peptide
RTFSRLAMG

SEQ ID NO: 723 - protein, 8 aa, Artificial Sequence
  Description of Artificial Sequence: Synthetic peptide
SFSIAAMG

SEQ ID NO: 724 - protein, 9 aa, Artificial Sequence
  Description of Artificial Sequence: Synthetic peptide
RTFSRYAMG

SEQ ID NO: 725 - protein, 9 aa, Artificial Sequence
  Description of Artificial Sequence: Synthetic peptide
RTFSKYAMG

SEQ ID NO: 726 - protein, 9 aa, Artificial Sequence
  Description of Artificial Sequence: Synthetic peptide
RTFRRYAMG

SEQ ID NO: 727 - protein, 9 aa, Artificial Sequence
  Description of Artificial Sequence: Synthetic peptide
RTFSRFAMG

SEQ ID NO: 728 - protein, 12 aa, Artificial Sequence
  Description of Artificial Sequence: Synthetic peptide
LGIAFSRRTAMG

SEQ ID NO: 729 - protein, 9 aa, Artificial Sequence
  Description of Artificial Sequence: Synthetic peptide
RTFRRYPMG

SEQ ID NO: 730 - protein, 9 aa, Artificial Sequence
  Description of Artificial Sequence: Synthetic peptide
GTLRGYGMG

SEQ ID NO: 731 - protein, 9 aa, Artificial Sequence
  Description of Artificial Sequence: Synthetic peptide
RMFSSRSMG

SEQ ID NO: 732 - protein, 9 aa, Artificial Sequence
  Description of Artificial Sequence: Synthetic peptide
RTFGRRAMG

SEQ ID NO: 733 - protein, 12 aa, Artificial Sequence
  Description of Artificial Sequence: Synthetic peptide
LSSPPFDDFPMG

SEQ ID NO: 734 - protein, 9 aa, Artificial Sequence
  Description of Artificial Sequence: Synthetic peptide
GTFSSYSMG

SEQ ID NO: 735 - protein, 9 aa, Artificial Sequence
  Description of Artificial Sequence: Synthetic peptide
SIFSTRTMG

SEQ ID NO: 736 - protein, 9 aa, Artificial Sequence
  Description of Artificial Sequence: Synthetic peptide
RTLWRSNMG

SEQ ID NO: 737 - protein, 9 aa, Artificial Sequence
  Description of Artificial Sequence: Synthetic peptide
RSLGIYRMG

SEQ ID NO: 738 - protein, 9 aa, Artificial Sequence
  Description of Artificial Sequence: Synthetic peptide
TTLTFRIMG

SEQ ID NO: 739 - protein, 13 aa, Artificial Sequence
  Description of Artificial Sequence: Synthetic peptide
SRFSGRFNILNMG

SEQ ID NO: 740 - protein, 9 aa, Artificial Sequence
  Description of Artificial Sequence: Synthetic peptide
TLFKINAMG

SEQ ID NO: 741 - protein, 9 aa, Artificial Sequence
  Description of Artificial Sequence: Synthetic peptide
IPFRSRTMG

SEQ ID NO: 742 - protein, 9 aa, Artificial Sequence
  Description of Artificial Sequence: Synthetic peptide
FTFSSFRMG

SEQ ID NO: 743 - protein, 9 aa, Artificial Sequence
  Description of Artificial Sequence: Synthetic peptide
RNFRRNSMG

SEQ ID NO: 744 - protein, 9 aa, Artificial Sequence
  Description of Artificial Sequence: Synthetic peptide
RNLRMYRMG

SEQ ID NO: 745 - protein, 10 aa, Artificial Sequence
  Description of Artificial Sequence: Synthetic peptide
GLTFSSNTMG

SEQ ID NO: 746 - protein, 9 aa, Artificial Sequence
  Description of Artificial Sequence: Synthetic peptide
FTLAYYAMG

SEQ ID NO: 747 - protein, 9 aa, Artificial Sequence
  Description of Artificial Sequence: Synthetic peptide
RTFSSFPMG

SEQ ID NO: 748 - protein, 9 aa, Artificial Sequence
  Description of Artificial Sequence: Synthetic peptide
ISSSKRNMG

SEQ ID NO: 749 - protein, 9 aa, Artificial Sequence
  Description of Artificial Sequence: Synthetic peptide
RTFSIYAMG

SEQ ID NO: 750 - protein, 9 aa, Artificial Sequence
  Description of Artificial Sequence: Synthetic peptide
RMYNSYSMG

SEQ ID NO: 751 - protein, 9 aa, Artificial Sequence
  Description of Artificial Sequence: Synthetic peptide
RTFRSYGMG

SEQ ID NO: 752 - protein, 7 aa, Artificial Sequence
  Description of Artificial Sequence: Synthetic peptide
RTIRTMG

SEQ ID NO: 753 - protein, 9 aa, Artificial Sequence
  Description of Artificial Sequence: Synthetic peptide
RSFSFNAMG

SEQ ID NO: 754 - protein, 7 aa, Artificial Sequence
  Description of Artificial Sequence: Synthetic peptide
RTYYAMG

SEQ ID NO: 755 - protein, 9 aa, Artificial Sequence
  Description of Artificial Sequence: Synthetic peptide
RAFRRYTMG

SEQ ID NO: 756 - protein, 9 aa, Artificial Sequence
  Description of Artificial Sequence: Synthetic peptide
RTFSNYRMG

SEQ ID NO: 757 - protein, 9 aa, Artificial Sequence
  Description of Artificial Sequence: Synthetic peptide
ITFSPYAMG

SEQ ID NO: 758 - protein, 14 aa, Artificial Sequence
  Description of Artificial Sequence: Synthetic peptide
RTFSGFTMSSTWMG

SEQ ID NO: 759 - protein, 9 aa, Artificial Sequence
  Description of Artificial Sequence: Synthetic peptide
RTFRRYSMG

SEQ ID NO: 760 - protein, 8 aa, Artificial Sequence
  Description of Artificial Sequence: Synthetic peptide
SIFSIGMG

SEQ ID NO: 761 - protein, 9 aa, Artificial Sequence
  Description of Artificial Sequence: Synthetic peptide
RTFTSYRMG

SEQ ID NO: 762 - protein, 12 aa, Artificial Sequence
  Description of Artificial Sequence: Synthetic peptide
RTFSSFRFRAMG

SEQ ID NO: 763 - protein, 9 aa, Artificial Sequence
  Description of Artificial Sequence: Synthetic peptide
RTFGSYGMG

SEQ ID NO: 764 - protein, 9 aa, Artificial Sequence
  Description of Artificial Sequence: Synthetic peptide
RTFRSYPMG

SEQ ID NO: 765 - protein, 9 aa, Artificial Sequence
  Description of Artificial Sequence: Synthetic peptide
RTFSRSDMG

SEQ ID NO: 766 - protein, 9 aa, Artificial Sequence
  Description of Artificial Sequence: Synthetic peptide
RTFRRYTMG

SEQ ID NO: 767 - protein, 9 aa, Artificial Sequence
  Description of Artificial Sequence: Synthetic peptide
SIFRLSTMG

SEQ ID NO: 768 - protein, 9 aa, Artificial Sequence
  Description of Artificial Sequence: Synthetic peptide
IAFRIRTMG

SEQ ID NO: 769 - protein, 9 aa, Artificial Sequence
  Description of Artificial Sequence: Synthetic peptide
FTFTSYRMG

SEQ ID NO: 770 - protein, 9 aa, Artificial Sequence
  Description of Artificial Sequence: Synthetic peptide
RTFSRYVMG

SEQ ID NO: 771 - protein, 6 aa, Artificial Sequence
  Description of Artificial Sequence: Synthetic peptide
RTFSMG

SEQ ID NO: 772 - protein, 9 aa, Artificial Sequence
  Description of Artificial Sequence: Synthetic peptide
RTFSTYTMG

SEQ ID NO: 773 - protein, 9 aa, Artificial Sequence
  Description of Artificial Sequence: Synthetic peptide
RNLRMYRMG

SEQ ID NO: 774 - protein, 9 aa, Artificial Sequence
  Description of Artificial Sequence: Synthetic peptide
ITIRTHAMG

SEQ ID NO: 775 - protein, 9 aa, Artificial Sequence
  Description of Artificial Sequence: Synthetic peptide
RTFRRYHMG

SEQ ID NO: 776 - protein, 9 aa, Artificial Sequence
  Description of Artificial Sequence: Synthetic peptide
RTFRRYTMG

SEQ ID NO: 777 - protein, 9 aa, Artificial Sequence
  Description of Artificial Sequence: Synthetic peptide
RTFSWYPMG

SEQ ID NO: 778 - protein, 9 aa, Artificial Sequence
  Description of Artificial Sequence: Synthetic peptide
RTFTSYRMG

SEQ ID NO: 779 - protein, 9 aa, Artificial Sequence
  Description of Artificial Sequence: Synthetic peptide
RPLRRYVMG

SEQ ID NO: 780 - protein, 9 aa, Artificial Sequence
  Description of Artificial Sequence: Synthetic peptide
RTFRRYAMG

SEQ ID NO: 781 - protein, 9 aa, Artificial Sequence
  Description of Artificial Sequence: Synthetic peptide
RTFRRYTMG

SEQ ID NO: 782 - protein, 9 aa, Artificial Sequence
  Description of Artificial Sequence: Synthetic peptide
RTLSTYNMG

SEQ ID NO: 783 - protein, 9 aa, Artificial Sequence
  Description of Artificial Sequence: Synthetic peptide
RFFSTRVMG

SEQ ID NO: 784 - protein, 9 aa, Artificial Sequence
  Description of Artificial Sequence: Synthetic peptide
RFFSICSMG

SEQ ID NO: 785 - protein, 10 aa, Artificial Sequence
  Description of Artificial Sequence: Synthetic peptide
RMFSSRSNMG

SEQ ID NO: 786 - protein, 9 aa, Artificial Sequence
  Description of Artificial Sequence: Synthetic peptide
RTFSSARMG

SEQ ID NO: 787 - protein, 9 aa, Artificial Sequence
  Description of Artificial Sequence: Synthetic peptide
RTFRRYTMG

SEQ ID NO: 788 - protein, 9 aa, Artificial Sequence
  Description of Artificial Sequence: Synthetic peptide
HTFRNYGMG

SEQ ID NO: 789 - protein, 9 aa, Artificial Sequence
  Description of Artificial Sequence: Synthetic peptide
RTFSRYAMG

SEQ ID NO: 790 - protein, 9 aa, Artificial Sequence
  Description of Artificial Sequence: Synthetic peptide
RNLRMYRMG

SEQ ID NO: 791 - protein, 9 aa, Artificial Sequence
  Description of Artificial Sequence: Synthetic peptide
RTFRRYAMG

SEQ ID NO: 792 - protein, 8 aa, Artificial Sequence
  Description of Artificial Sequence: Synthetic peptide
IPASMYLG

SEQ ID NO: 793 - protein, 14 aa, Artificial Sequence
  Description of Artificial Sequence: Synthetic peptide
IPFRSRTFSAYAMG

SEQ ID NO: 794 - protein, 9 aa, Artificial Sequence
  Description of Artificial Sequence: Synthetic peptide
FTFSSYAMH

SEQ ID NO: 795 - protein, 9 aa, Artificial Sequence
  Description of Artificial Sequence: Synthetic peptide
FSFNNYGMH

SEQ ID NO: 796 - protein, 9 aa, Artificial Sequence
  Description of Artificial Sequence: Synthetic peptide
FTFGTYAMH

SEQ ID NO: 797 - protein, 9 aa, Artificial Sequence
  Description of Artificial Sequence: Synthetic peptide
FDFSDYYMH

SEQ ID NO: 798 - protein, 9 aa, Artificial Sequence
  Description of Artificial Sequence: Synthetic peptide
FTFGTYAMH

SEQ ID NO: 799 - protein, 9 aa, Artificial Sequence
  Description of Artificial Sequence: Synthetic peptide
FTFSGYAMH

SEQ ID NO: 800 - protein, 9 aa, Artificial Sequence
  Description of Artificial Sequence: Synthetic peptide
FTFSSYAMH

SEQ ID NO: 801 - protein, 9 aa, Artificial Sequence
  Description of Artificial Sequence: Synthetic peptide
FTFSSYAMH

SEQ ID NO: 802 - protein, 9 aa, Artificial Sequence
  Description of Artificial Sequence: Synthetic peptide
FIFRSYAMH

SEQ ID NO: 803 - protein, 9 aa, Artificial Sequence
  Description of Artificial Sequence: Synthetic peptide
FTFSDYGMH

SEQ ID NO: 804 - protein, 9 aa, Artificial Sequence
  Description of Artificial Sequence: Synthetic peptide
FTFSNFPMH

SEQ ID NO: 805 - protein, 9 aa, Artificial Sequence
  Description of Artificial Sequence: Synthetic peptide
FTFSRFAMH

SEQ ID NO: 806 - protein, 9 aa, Artificial Sequence
  Description of Artificial Sequence: Synthetic peptide
FTFNNYAMH

SEQ ID NO: 807 - protein, 9 aa, Artificial Sequence
  Description of Artificial Sequence: Synthetic peptide
FTFSDYTMH

SEQ ID NO: 808 - skipped

SEQ ID NO: 809 - protein, 9 aa, Artificial Sequence
  Description of Artificial Sequence: Synthetic peptide
FTFSRYAMH

SEQ ID NO: 810 - protein, 9 aa, Artificial Sequence
  Description of Artificial Sequence: Synthetic peptide
FTFSRYAMH

SEQ ID NO: 811 - protein, 9 aa, Artificial Sequence
  Description of Artificial Sequence: Synthetic peptide
FTFSRYAMH

SEQ ID NO: 812 - protein, 9 aa, Artificial Sequence
  Description of Artificial Sequence: Synthetic peptide
FTFSRYAMH

SEQ ID NO: 813 - protein, 9 aa, Artificial Sequence
  Description of Artificial Sequence: Synthetic peptide
FTFSRYAMH

SEQ ID NO: 814 - protein, 9 aa, Artificial Sequence
  Description of Artificial Sequence: Synthetic peptide
FTFSRYAMH

SEQ ID NO: 815 - protein, 9 aa, Artificial Sequence
  Description of Artificial Sequence: Synthetic peptide
FTFGSYGMH

SEQ ID NO: 816 - protein, 9 aa, Artificial Sequence
  Description of Artificial Sequence: Synthetic peptide
FTFGTYAMH

SEQ ID NO: 817 - protein, 9 aa, Artificial Sequence
  Description of Artificial Sequence: Synthetic peptide
FTFSNFAMH

SEQ ID NO: 818 - protein, 9 aa, Artificial Sequence
  Description of Artificial Sequence: Synthetic peptide
FTFDNYAMH

SEQ ID NO: 819 - protein, 9 aa, Artificial Sequence
  Description of Artificial Sequence: Synthetic peptide
FTFSSFAMH

SEQ ID NO: 820 - protein, 9 aa, Artificial Sequence
  Description of Artificial Sequence: Synthetic peptide
FTFGTYAMH

SEQ ID NO: 821 - protein, 9 aa, Artificial Sequence
  Description of Artificial Sequence: Synthetic peptide
FTFSSYAMH

SEQ ID NO: 822 - protein, 9 aa, Artificial Sequence
  Description of Artificial Sequence: Synthetic peptide
FTFSSYAMH

SEQ ID NO: 823 - protein, 9 aa, Artificial Sequence
  Description of Artificial Sequence: Synthetic peptide
FTFGTYAMH

SEQ ID NO: 824 - protein, 9 aa, Artificial Sequence
  Description of Artificial Sequence: Synthetic peptide
FIFNNYGMH

SEQ ID NO: 825 - protein, 9 aa, Artificial Sequence
  Description of Artificial Sequence: Synthetic peptide
FTFDNYAMH

SEQ ID NO: 826 - protein, 9 aa, Artificial Sequence
  Description of Artificial Sequence: Synthetic peptide
FTFSSQAMH

SEQ ID NO: 827 - protein, 9 aa, Artificial Sequence
  Description of Artificial Sequence: Synthetic peptide
FSFSSYGMH

SEQ ID NO: 828 - protein, 9 aa, Artificial Sequence
  Description of Artificial Sequence: Synthetic peptide
FTFSSYSMH

SEQ ID NO: 829 - protein, 9 aa, Artificial Sequence
  Description of Artificial Sequence: Synthetic peptide
FIFSNYGMH

SEQ ID NO: 830 - protein, 9 aa, Artificial Sequence
  Description of Artificial Sequence: Synthetic peptide
FTFSDHYMH

SEQ ID NO: 831 - protein, 9 aa, Artificial Sequence
  Description of Artificial Sequence: Synthetic peptide
FIFSSYAMH

SEQ ID NO: 832 - protein, 9 aa, Artificial Sequence
  Description of Artificial Sequence: Synthetic peptide
FTFGTYAMH

SEQ ID NO: 833 - protein, 9 aa, Artificial Sequence
  Description of Artificial Sequence: Synthetic peptide
FTFSSYAMH

SEQ ID NO: 834 - protein, 9 aa, Artificial Sequence
  Description of Artificial Sequence: Synthetic peptide
FTFDDYAMH

SEQ ID NO: 835 - protein, 9 aa, Artificial Sequence
  Description of Artificial Sequence: Synthetic peptide
FTFSYYGMH

SEQ ID NO: 836 - protein, 9 aa, Artificial Sequence
  Description of Artificial Sequence: Synthetic peptide
FIFRSYAMH

SEQ ID NO: 837 - protein, 9 aa, Artificial Sequence
  Description of Artificial Sequence: Synthetic peptide
FTFSSYAMH

SEQ ID NO: 838 - protein, 9 aa, Artificial Sequence
  Description of Artificial Sequence: Synthetic peptide
FTFSYYGMH

SEQ ID NO: 839 - protein, 9 aa, Artificial Sequence
  Description of Artificial Sequence: Synthetic peptide
FTFSYYGMH

SEQ ID NO: 840 - protein, 9 aa, Artificial Sequence
  Description of Artificial Sequence: Synthetic peptide
FIFRNYAMH

SEQ ID NO: 841 - protein, 9 aa, Artificial Sequence
  Description of Artificial Sequence: Synthetic peptide
FTFSIYAMH

SEQ ID NO: 842 - protein, 9 aa, Artificial Sequence
  Description of Artificial Sequence: Synthetic peptide
FTFNNYVMH

SEQ ID NO: 843 - protein, 9 aa, Artificial Sequence
  Description of Artificial Sequence: Synthetic peptide
FTFSSYGMH

SEQ ID NO: 844 - protein, 9 aa, Artificial Sequence
  Description of Artificial Sequence: Synthetic peptide
FIFRSYAMH

SEQ ID NO: 845 - protein, 9 aa, Artificial Sequence
  Description of Artificial Sequence: Synthetic peptide
FSFGGYGMH

SEQ ID NO: 846 - protein, 9 aa, Artificial Sequence
  Description of Artificial Sequence: Synthetic peptide
FAFSSHAMH

SEQ ID NO: 847 - protein, 9 aa, Artificial Sequence
  Description of Artificial Sequence: Synthetic peptide
FSFSTYGMH

SEQ ID NO: 848 - protein, 9 aa, Artificial Sequence
  Description of Artificial Sequence: Synthetic peptide
FTFSSYSMH

SEQ ID NO: 849 - protein, 9 aa, Artificial Sequence
  Description of Artificial Sequence: Synthetic peptide
FSFGGYGMH

SEQ ID NO: 850 - protein, 9 aa, Artificial Sequence
  Description of Artificial Sequence: Synthetic peptide
FIFRSYAMH

SEQ ID NO: 851 - protein, 9 aa, Artificial Sequence
  Description of Artificial Sequence: Synthetic peptide
FTFGSYGMH

SEQ ID NO: 852 - protein, 9 aa, Artificial Sequence
  Description of Artificial Sequence: Synthetic peptide
FTFSSYAMH

SEQ ID NO: 853 - protein, 9 aa, Artificial Sequence
  Description of Artificial Sequence: Synthetic peptide
FAFSSYAMH

SEQ ID NO: 854 - protein, 9 aa, Artificial Sequence
  Description of Artificial Sequence: Synthetic peptide
FSFGGYGMH

SEQ ID NO: 855 - protein, 9 aa, Artificial Sequence
  Description of Artificial Sequence: Synthetic peptide
FSFGGYGMH

SEQ ID NO: 856 - protein, 9 aa, Artificial Sequence
  Description of Artificial Sequence: Synthetic peptide
FTFSSYGMH

SEQ ID NO: 857 - protein, 9 aa, Artificial Sequence
  Description of Artificial Sequence: Synthetic peptide
FIFSSYAMH

SEQ ID NO: 858 - protein, 9 aa, Artificial Sequence
  Description of Artificial Sequence: Synthetic peptide
FTFSNFPMH

SEQ ID NO: 859 - protein, 9 aa, Artificial Sequence
  Description of Artificial Sequence: Synthetic peptide
FTFSSYAMH

SEQ ID NO: 860 - protein, 9 aa, Artificial Sequence
  Description of Artificial Sequence: Synthetic peptide
FTFSNYAMH

SEQ ID NO: 861 - protein, 9 aa, Artificial Sequence
  Description of Artificial Sequence: Synthetic peptide
FSFGGYGMH

SEQ ID NO: 862 - protein, 9 aa, Artificial Sequence
  Description of Artificial Sequence: Synthetic peptide
FTFSSYAMH

SEQ ID NO: 863 - protein, 9 aa, Artificial Sequence
  Description of Artificial Sequence: Synthetic peptide
FSFSNYGMH

SEQ ID NO: 864 - protein, 9 aa, Artificial Sequence
  Description of Artificial Sequence: Synthetic peptide
FTFSGYAMH

SEQ ID NO: 865 - skipped

SEQ ID NO: 866 - protein, 9 aa, Artificial Sequence
  Description of Artificial Sequence: Synthetic peptide
FTFGTYAMH

SEQ ID NO: 867 - protein, 9 aa, Artificial Sequence
  Description of Artificial Sequence: Synthetic peptide
FTFSSYAMH

SEQ ID NO: 868 - protein, 9 aa, Artificial Sequence
  Description of Artificial Sequence: Synthetic peptide
FIFRSYAMH

SEQ ID NO: 869 - protein, 9 aa, Artificial Sequence
  Description of Artificial Sequence: Synthetic peptide
FTFSSSSMH

SEQ ID NO: 870 - protein, 9 aa, Artificial Sequence
  Description of Artificial Sequence: Synthetic peptide
FSFNNYGMH

SEQ ID NO: 871 - protein, 9 aa, Artificial Sequence
  Description of Artificial Sequence: Synthetic peptide
FTFSSYAMH

SEQ ID NO: 872 - protein, 9 aa, Artificial Sequence
  Description of Artificial Sequence: Synthetic peptide
FTFSSYAMH

SEQ ID NO: 873 - protein, 9 aa, Artificial Sequence
  Description of Artificial Sequence: Synthetic peptide
FTFSSYAMH

SEQ ID NO: 874 - protein, 9 aa, Artificial Sequence
  Description of Artificial Sequence: Synthetic peptide
FTFSSYAMH

SEQ ID NO: 875 - protein, 9 aa, Artificial Sequence
  Description of Artificial Sequence: Synthetic peptide
FIFSSYAMH

SEQ ID NO: 876 - protein, 9 aa, Artificial Sequence
  Description of Artificial Sequence: Synthetic peptide
FTFGSYGMH

SEQ ID NO: 877 - protein, 9 aa, Artificial Sequence
  Description of Artificial Sequence: Synthetic peptide
FIFSSYGMH

SEQ ID NO: 878 - protein, 9 aa, Artificial Sequence
  Description of Artificial Sequence: Synthetic peptide
FTFSSYSMH

SEQ ID NO: 879 - protein, 9 aa, Artificial Sequence
  Description of Artificial Sequence: Synthetic peptide
FTFSSYAMH

SEQ ID NO: 880 - protein, 9 aa, Artificial Sequence
  Description of Artificial Sequence: Synthetic peptide
FSFNNHAMH

SEQ ID NO: 881 - protein, 9 aa, Artificial Sequence
  Description of Artificial Sequence: Synthetic peptide
FAFDDYAMH

SEQ ID NO: 882 - protein, 9 aa, Artificial Sequence
  Description of Artificial Sequence: Synthetic peptide
FIFRSYAMH

SEQ ID NO: 883 - protein, 13 aa, Artificial Sequence
  Description of Artificial Sequence: Synthetic peptide
SAISGSGVSTYYA

SEQ ID NO: 884 - protein, 13 aa, Artificial Sequence
  Description of Artificial Sequence: Synthetic peptide
SAISGSGGNTYYA

SEQ ID NO: 885 - protein, 13 aa, Artificial Sequence
  Description of Artificial Sequence: Synthetic peptide
SAISGSGGSSYYA

SEQ ID NO: 886 - protein, 13 aa, Artificial Sequence
  Description of Artificial Sequence: Synthetic peptide
SAISGSGGSTHYA

SEQ ID NO: 887 - protein, 13 aa, Artificial Sequence
  Description of Artificial Sequence: Synthetic peptide
SAISGSGYSTYYA

SEQ ID NO: 888 - protein, 13 aa, Artificial Sequence
  Description of Artificial Sequence: Synthetic peptide
SAISGSGVSTYYA

SEQ ID NO: 889 - protein, 12 aa, Artificial Sequence
  Description of Artificial Sequence: Synthetic peptide
SAISGSGGSYYA

SEQ ID NO: 890 - protein, 13 aa, Artificial Sequence
  Description of Artificial Sequence: Synthetic peptide
SLISGSGGSTYYA

SEQ ID NO: 891 - protein, 13 aa, Artificial Sequence
  Description of Artificial Sequence: Synthetic peptide
SAISGSGGSTFYA

SEQ ID NO: 892 - protein, 13 aa, Artificial Sequence
  Description of Artificial Sequence: Synthetic peptide
SIISGSGGSTYYA

SEQ ID NO: 893 - protein, 13 aa, Artificial Sequence
  Description of Artificial Sequence: Synthetic peptide
STISGSGGSTYYA

SEQ ID NO: 894 - protein, 13 aa, Artificial Sequence
  Description of Artificial Sequence: Synthetic peptide
SAISGSAGSTYYA

SEQ ID NO: 895 - protein, 13 aa, Artificial Sequence
  Description of Artificial Sequence: Synthetic peptide
SAISGSGGTTYYA

SEQ ID NO: 896 - protein, 13 aa, Artificial Sequence
  Description of Artificial Sequence: Synthetic peptide
SAISGSGASTYYA

SEQ ID NO: 897 - protein, 12 aa, Artificial Sequence
  Description of Artificial Sequence: Synthetic peptide
SAISGSGATYYA

SEQ ID NO: 898 - protein, 13 aa, Artificial Sequence
  Description of Artificial Sequence: Synthetic peptide
SAISGSGGNTYYA

SEQ ID NO: 899 - protein, 13 aa, Artificial Sequence
  Description of Artificial Sequence: Synthetic peptide
SSISGSGGSTYYA

SEQ ID NO: 900 - protein, 13 aa, Artificial Sequence
  Description of Artificial Sequence: Synthetic peptide
SAISGSGVSTYYA

SEQ ID NO: 901 - protein, 13 aa, Artificial Sequence
  Description of Artificial Sequence: Synthetic peptide
SAISGSAGSTTMR

SEQ ID NO: 902 - protein, 13 aa, Artificial Sequence
  Description of Artificial Sequence: Synthetic peptide
SALSGSGGSTYYA

SEQ ID NO: 903 - protein, 13 aa, Artificial Sequence
  Description of Artificial Sequence: Synthetic peptide
SAISGSGGTTYYA

SEQ ID NO: 904 - protein, 12 aa, Artificial Sequence
  Description of Artificial Sequence: Synthetic peptide
SAISGSGGTYYA

SEQ ID NO: 905 - protein, 13 aa, Artificial Sequence
  Description of Artificial Sequence: Synthetic peptide
SAIRGSGGSTYYA

SEQ ID NO: 906 - protein, 13 aa, Artificial Sequence
  Description of Artificial Sequence: Synthetic peptide
SAIGGSGGSTYYA

SEQ ID NO: 907 - protein, 13 aa, Artificial Sequence
  Description of Artificial Sequence: Synthetic peptide
SAISVSGGSTYYA

SEQ ID NO: 908 - protein, 12 aa, Artificial Sequence
  Description of Artificial Sequence: Synthetic peptide
SAISGSGGTYYA

SEQ ID NO: 909 - protein, 12 aa, Artificial Sequence
  Description of Artificial Sequence: Synthetic peptide
SAISGSGRSTYY

SEQ ID NO: 910 - protein, 13 aa, Artificial Sequence
  Description of Artificial Sequence: Synthetic peptide
SAISGSGGSIYYA

SEQ ID NO: 911 - protein, 13 aa, Artificial Sequence
  Description of Artificial Sequence: Synthetic peptide
SIISGSGGSTYYA

SEQ ID NO: 912 - protein, 13 aa, Artificial Sequence
  Description of Artificial Sequence: Synthetic peptide
SAISGSGGRTYYA

SEQ ID NO: 913 - protein, 11 aa, Artificial Sequence
  Description of Artificial Sequence: Synthetic peptide
SAISGGTTYYA

SEQ ID NO: 914 - protein, 13 aa, Artificial Sequence
  Description of Artificial Sequence: Synthetic peptide
TAISVSGGSTYYA

SEQ ID NO: 915 - protein, 13 aa, Artificial Sequence
  Description of Artificial Sequence: Synthetic peptide
SAISGSSGSTYYA

SEQ ID NO: 916 - protein, 13 aa, Artificial Sequence
  Description of Artificial Sequence: Synthetic peptide
SAISASGGSTYYA

SEQ ID NO: 917 - protein, 13 aa, Artificial Sequence
  Description of Artificial Sequence: Synthetic peptide
SAIRGSGGSTYYA

SEQ ID NO: 918 - protein, 13 aa, Artificial Sequence
  Description of Artificial Sequence: Synthetic peptide
SAISGSGGATYYA

SEQ ID NO: 919 - protein, 11 aa, Artificial Sequence
  Description of Artificial Sequence: Synthetic peptide
ATWRPANTNYA

SEQ ID NO: 920 - protein, 13 aa, Artificial Sequence
  Description of Artificial Sequence: Synthetic peptide
AAISRTGGSTYYA

SEQ ID NO: 921 - protein, 13 aa, Artificial Sequence
  Description of Artificial Sequence: Synthetic peptide
AEIYPSGNGVYYA

SEQ ID NO: 922 - protein, 11 aa, Artificial Sequence
  Description of Artificial Sequence: Synthetic peptide
AAIARRERVYA

SEQ ID NO: 923 - protein, 12 aa, Artificial Sequence
  Description of Artificial Sequence: Synthetic peptide
AISWRTGTTYYA

SEQ ID NO: 924 - protein, 13 aa, Artificial Sequence
  Description of Artificial Sequence: Synthetic peptide
AGIWRSGVSLYYA

SEQ ID NO: 925 - protein, 12 aa, Artificial Sequence
  Description of Artificial Sequence: Synthetic peptide
AIIKSDGSTYYA

SEQ ID NO: 926 - protein, 13 aa, Artificial Sequence
  Description of Artificial Sequence: Synthetic peptide
SSIGIAGTPTLYA

SEQ ID NO: 927 - protein, 12 aa, Artificial Sequence
  Description of Artificial Sequence: Synthetic peptide
AAVINGGTTNYA

SEQ ID NO: 928 - protein, 12 aa, Artificial Sequence
  Description of Artificial Sequence: Synthetic peptide
GFTGSGRSQYYA

SEQ ID NO: 929 - protein, 13 aa, Artificial Sequence
  Description of Artificial Sequence: Synthetic peptide
AGIWEDSSAAHYA

SEQ ID NO: 930 - protein, 12 aa, Artificial Sequence
  Description of Artificial Sequence: Synthetic peptide
AGITSGGTRNYA

SEQ ID NO: 931 - protein, 13 aa, Artificial Sequence
  Description of Artificial Sequence: Synthetic peptide
AAISWGGGLTVYA

SEQ ID NO: 932 - protein, 12 aa, Artificial Sequence
  Description of Artificial Sequence: Synthetic peptide
ATVRSGSITNYA

SEQ ID NO: 933 - protein, 13 aa, Artificial Sequence
  Description of Artificial Sequence: Synthetic peptide
VAVTWSGGSTYYA

SEQ ID NO: 934 - protein, 13 aa, Artificial Sequence
  Description of Artificial Sequence: Synthetic peptide
AAISWSGESTLYA

SEQ ID NO: 935 - protein, 12 aa, Artificial Sequence
  Description of Artificial Sequence: Synthetic peptide
AAINRGGSTIYV

SEQ ID NO: 936 - protein, 13 aa, Artificial Sequence
  Description of Artificial Sequence: Synthetic peptide
SAISWNDGGADYA

SEQ ID NO: 937 - protein, 12 aa, Artificial Sequence
  Description of Artificial Sequence: Synthetic peptide
AFSSSGGSTYYA

SEQ ID NO: 938 - protein, 15 aa, Artificial Sequence
  Description of Artificial Sequence: Synthetic peptide
ATITEGGATNVGSTS

SEQ ID NO: 939 - protein, 12 aa, Artificial Sequence
  Description of Artificial Sequence: Synthetic peptide
GAITSSRSTVYA

SEQ ID NO: 940 - protein, 11 aa, Artificial Sequence
  Description of Artificial Sequence: Synthetic peptide
GGTRSGSTNYA

SEQ ID NO: 941 - protein, 13 aa, Artificial Sequence
  Description of Artificial Sequence: Synthetic peptide
AAVIGSSGTTYYA

SEQ ID NO: 942 - protein, 12 aa, Artificial Sequence
  Description of Artificial Sequence: Synthetic peptide
ASITYLGRTNYA

SEQ ID NO: 943 - protein, 13 aa, Artificial Sequence
  Description of Artificial Sequence: Synthetic peptide
AAINWSGARTYYA

SEQ ID NO: 944 - protein, 13 aa, Artificial Sequence
  Description of Artificial Sequence: Synthetic peptide
AAVSWSGSSTYYA

SEQ ID NO: 945 - protein, 13 aa, Artificial Sequence
  Description of Artificial Sequence: Synthetic peptide
AAISWSTGSTYYA

SEQ ID NO: 946 - protein, 11 aa, Artificial Sequence
  Description of Artificial Sequence: Synthetic peptide
SAISGGLAYYA

SEQ ID NO: 947 - protein, 12 aa, Artificial Sequence
  Description of Artificial Sequence: Synthetic peptide
ASITHQDRPIYA

SEQ ID NO: 948 - protein, 12 aa, Artificial Sequence
  Description of Artificial Sequence: Synthetic peptide
ASITYLGRTYYA

SEQ ID NO: 949 - protein, 13 aa, Artificial Sequence
  Description of Artificial Sequence: Synthetic peptide
AGITSSGGYTNYA

SEQ ID NO: 950 - protein, 13 aa, Artificial Sequence
  Description of Artificial Sequence: Synthetic peptide
SAISGSGGSTYYA

SEQ ID NO: 951 - protein, 13 aa, Artificial Sequence
  Description of Artificial Sequence: Synthetic peptide
SDIGGSGSTTYYA

SEQ ID NO: 952 - protein, 20 aa, Artificial Sequence
  Description of Artificial Sequence: Synthetic peptide
AGITRSAVSTITSEGTANYA

SEQ ID NO: 953 - protein, 13 aa, Artificial Sequence
  Description of Artificial Sequence: Synthetic peptide
SASSGSGGSTYYA

SEQ ID NO: 954 - protein, 12 aa, Artificial Sequence
  Description of Artificial Sequence: Synthetic peptide
AAISSGGSTNYA

SEQ ID NO: 955 - protein, 16 aa, Artificial Sequence
  Description of Artificial Sequence: Synthetic peptide
AAVRWSSTGIYYTQYA

SEQ ID NO: 956 - protein, 13 aa, Artificial Sequence
  Description of Artificial Sequence: Synthetic peptide
TAINWSGARTAYA

SEQ ID NO: 957 - protein, 13 aa, Artificial Sequence
  Description of Artificial Sequence: Synthetic peptide
SGISHNGGTTNYA

SEQ ID NO: 958 - protein, 13 aa, Artificial Sequence
  Description of Artificial Sequence: Synthetic peptide
AAISWDGGATAYA

SEQ ID NO: 959 - protein, 13 aa, Artificial Sequence
  Description of Artificial Sequence: Synthetic peptide
AEINWSGSSTYYA

SEQ ID NO: 960 - protein, 12 aa, Artificial Sequence
  Description of Artificial Sequence: Synthetic peptide
AAIHWSGLTSYA

SEQ ID NO: 961 - protein, 12 aa, Artificial Sequence
  Description of Artificial Sequence: Synthetic peptide
AAISPSAFTEYA

SEQ ID NO: 962 - protein, 13 aa, Artificial Sequence
  Description of Artificial Sequence: Synthetic peptide
AAISGWSGGTNYA

SEQ ID NO: 963 - protein, 12 aa, Artificial Sequence
  Description of Artificial Sequence: Synthetic peptide
AGISRGGTTNYA

SEQ ID NO: 964 - protein, 13 aa, Artificial Sequence
  Description of Artificial Sequence: Synthetic peptide
ASISRFFGTAYYA

SEQ ID NO: 965 - protein, 13 aa, Artificial Sequence
  Description of Artificial Sequence: Synthetic peptide
SAISGSGGSTDYA

SEQ ID NO: 966 - protein, 12 aa, Artificial Sequence
  Description of Artificial Sequence: Synthetic peptide
AAITSGGTPHYA

SEQ ID NO: 967 - protein, 12 aa, Artificial Sequence
  Description of Artificial Sequence: Synthetic peptide
ASITLGGSTAYA

SEQ ID NO: 968 - protein, 12 aa, Artificial Sequence
  Description of Artificial Sequence: Synthetic peptide
ASITSSGVNAYA

SEQ ID NO: 969 - protein, 13 aa, Artificial Sequence
  Description of Artificial Sequence: Synthetic peptide
AGISWNGGSTNYA

SEQ ID NO: 970 - protein, 12 aa, Artificial Sequence
  Description of Artificial Sequence: Synthetic peptide
ASITSGGSTAYA

SEQ ID NO: 971 - protein, 12 aa, Artificial Sequence
  Description of Artificial Sequence: Synthetic peptide
ASITSGGSTAYA

SEQ ID NO: 972 - protein, 12 aa, Artificial Sequence
  Description of Artificial Sequence: Synthetic peptide
AEIYPSGSTIYA

SEQ ID NO: 973 - protein, 13 aa, Artificial Sequence
  Description of Artificial Sequence: Synthetic peptide
STITGSGGSTNYA

SEQ ID NO: 974 - protein, 12 aa, Artificial Sequence
  Description of Artificial Sequence: Synthetic peptide
ASIEWDGSTYYA

SEQ ID NO: 975 - protein, 13 aa, Artificial Sequence
  Description of Artificial Sequence: Synthetic peptide
AGITSSGGYTNYA

SEQ ID NO: 976 - protein, 13 aa, Artificial Sequence
  Description of Artificial Sequence: Synthetic peptide
AEINWSGSSTYYA

SEQ ID NO: 977 - protein, 13 aa, Artificial Sequence
  Description of Artificial Sequence: Synthetic peptide
AILAWDSGSTYYA

SEQ ID NO: 978 - protein, 12 aa, Artificial Sequence
  Description of Artificial Sequence: Synthetic peptide
ASITSYGDTNYA

SEQ ID NO: 979 - protein, 12 aa, Artificial Sequence
  Description of Artificial Sequence: Synthetic peptide
ASISSQGRTNYA

SEQ ID NO: 980 - protein, 13 aa, Artificial Sequence
  Description of Artificial Sequence: Synthetic peptide
AAIHWNGDSTAYA

SEQ ID NO: 981 - protein, 12 aa, Artificial Sequence
  Description of Artificial Sequence: Synthetic peptide
AGVTRGGYTNYA

SEQ ID NO: 982 - protein, 12 aa, Artificial Sequence
  Description of Artificial Sequence: Synthetic peptide
AGISNGGTTNYA

SEQ ID NO: 983 - protein, 13 aa, Artificial Sequence
  Description of Artificial Sequence: Synthetic peptide
AFIHRSGGSTYYA

SEQ ID NO: 984 - protein, 13 aa, Artificial Sequence
  Description of Artificial Sequence: Synthetic peptide
AAVSWSGSSTYYA

SEQ ID NO: 985 - protein, 13 aa, Artificial Sequence
  Description of Artificial Sequence: Synthetic peptide
TAINWSGARAYYA

SEQ ID NO: 986 - protein, 13 aa, Artificial Sequence
  Description of Artificial Sequence: Synthetic peptide
AGITRSGSVTNYA

SEQ ID NO: 987 - protein, 13 aa, Artificial Sequence
  Description of Artificial Sequence: Synthetic peptide
SSIHWGGRGTNYA

SEQ ID NO: 988 - protein, 13 aa, Artificial Sequence
  Description of Artificial Sequence: Synthetic peptide
AAITWSGDSTNYA

SEQ ID NO: 989 - protein, 12 aa, Artificial Sequence
  Description of Artificial Sequence: Synthetic peptide
ASITKFGSTNYA

SEQ ID NO: 990 - protein, 12 aa, Artificial Sequence
  Description of Artificial Sequence: Synthetic peptide
ASISSRGITHYA

SEQ ID NO: 991 - protein, 12 aa, Artificial Sequence
  Description of Artificial Sequence: Synthetic peptide
AAITSGGTPHYG

SEQ ID NO: 992 - protein, 13 aa, Artificial Sequence
  Description of Artificial Sequence: Synthetic peptide
AAVSWSGSTTYYA

SEQ ID NO: 993 - protein, 13 aa, Artificial Sequence
  Description of Artificial Sequence: Synthetic peptide
AAITRGSNTTDYA

SEQ ID NO: 994 - protein, 12 aa, Artificial Sequence
  Description of Artificial Sequence: Synthetic peptide
ASITSGGSTNYA

SEQ ID NO: 995 - protein, 13 aa, Artificial Sequence
  Description of Artificial Sequence: Synthetic peptide
GAISRSGDSTYYA

SEQ ID NO: 996 - protein, 12 aa, Artificial Sequence
  Description of Artificial Sequence: Synthetic peptide
AGITSDDRTNYA

SEQ ID NO: 997 - protein, 13 aa, Artificial Sequence
  Description of Artificial Sequence: Synthetic peptide
AAISWSGGSTAYA

SEQ ID NO: 998 - protein, 10 aa, Artificial Sequence
  Description of Artificial Sequence: Synthetic peptide
AFIGSDTLYA

SEQ ID NO: 999 - protein, 12 aa, Artificial Sequence
  Description of Artificial Sequence: Synthetic peptide
AFISGNGGTSYA

SEQ ID NO: 1000 - protein, 12 aa, Artificial Sequence
  Description of Artificial Sequence: Synthetic peptide
SAIDSEGRTSYA

SEQ ID NO: 1001 - protein, 16 aa, Artificial Sequence
  Description of Artificial Sequence: Synthetic peptide
AAVRWSSTGIYYTQYA

SEQ ID NO: 1002 - protein, 13 aa, Artificial Sequence
  Description of Artificial Sequence: Synthetic peptide
AAISWSGDITIYA

SEQ ID NO: 1003 - protein, 13 aa, Artificial Sequence
  Description of Artificial Sequence: Synthetic peptide
AAISWSTGIAHYA

SEQ ID NO: 1004 - protein, 13 aa, Artificial Sequence
  Description of Artificial Sequence: Synthetic peptide
AAVTWSGGTTNYA

SEQ ID NO: 1005 - protein, 13 aa, Artificial Sequence
  Description of Artificial Sequence: Synthetic peptide
GGISWSGGNTYYA

SEQ ID NO: 1006 - protein, 13 aa, Artificial Sequence
  Description of Artificial Sequence: Synthetic peptide
AAINWSAGYTAYA

SEQ ID NO: 1007 - protein, 13 aa, Artificial Sequence
  Description of Artificial Sequence: Synthetic peptide
AAINWSGGTTRYA

SEQ ID NO: 1008 - protein, 13 aa, Artificial Sequence
  Description of Artificial Sequence: Synthetic peptide
AAINWIAGYTADA

SEQ ID NO: 1009 - protein, 13 aa, Artificial Sequence
  Description of Artificial Sequence: Synthetic peptide
AAINWSGGNTYYA

SEQ ID NO: 1010 - protein, 13 aa, Artificial Sequence
  Description of Artificial Sequence: Synthetic peptide
AAINWTGGYTPYA

SEQ ID NO: 1011 - protein, 13 aa, Artificial Sequence
  Description of Artificial Sequence: Synthetic peptide
AAINWSGGYTAYA

SEQ ID NO: 1012 - protein, 13 aa, Artificial Sequence
  Description of Artificial Sequence: Synthetic peptide
GGINWSGGYTYYA

SEQ ID NO: 1013 - protein, 13 aa, Artificial Sequence
  Description of Artificial Sequence: Synthetic peptide
AAINWSGGYTHYA

SEQ ID NO: 1014 - protein, 13 aa, Artificial Sequence
  Description of Artificial Sequence: Synthetic peptide
AAIHWSGSSTRYA

SEQ ID NO: 1015 - protein, 13 aa, Artificial Sequence
  Description of Artificial Sequence: Synthetic peptide
APINWSGGSTYYA

SEQ ID NO: 1016 - protein, 13 aa, Artificial Sequence
  Description of Artificial Sequence: Synthetic peptide
AAINWSGGNTPYA

SEQ ID NO: 1017 - protein, 13 aa, Artificial Sequence
  Description of Artificial Sequence: Synthetic peptide
AAINWSGDNTHYA

SEQ ID NO: 1018 - protein, 13 aa, Artificial Sequence
  Description of Artificial Sequence: Synthetic peptide
AAINWSGGTTRYA

SEQ ID NO: 1019 - protein, 13 aa, Artificial Sequence
  Description of Artificial Sequence: Synthetic peptide
AAINWSGDSTYYA

SEQ ID NO: 1020 - protein, 13 aa, Artificial Sequence
  Description of Artificial Sequence: Synthetic peptide
AAINWSGGYTYYA

SEQ ID NO: 1021 - protein, 13 aa, Artificial Sequence
  Description of Artificial Sequence: Synthetic peptide
AAINWSGGNTDYA

SEQ ID NO: 1022 - protein, 13 aa, Artificial Sequence
  Description of Artificial Sequence: Synthetic peptide
AAINWSGGYTPYA

SEQ ID NO: 1023 - protein, 13 aa, Artificial Sequence
  Description of Artificial Sequence: Synthetic peptide
AAINWSGGSTYYA

SEQ ID NO: 1024 - protein, 13 aa, Artificial Sequence
  Description of Artificial Sequence: Synthetic peptide
AAIHWSAGYTRYA

SEQ ID NO: 1025 - protein, 13 aa, Artificial Sequence
  Description of Artificial Sequence: Synthetic peptide
AGMTWSGSSTFYA

SEQ ID NO: 1026 - protein, 13 aa, Artificial Sequence
  Description of Artificial Sequence: Synthetic peptide
AAINWSGDNTHYA

SEQ ID NO: 1027 - protein, 13 aa, Artificial Sequence
  Description of Artificial Sequence: Synthetic peptide
AGISWNGGSIYYA

SEQ ID NO: 1028 - protein, 13 aa, Artificial Sequence
  Description of Artificial Sequence: Synthetic peptide
AAINWSGGTTYYA

SEQ ID NO: 1029 - protein, 12 aa, Artificial Sequence
  Description of Artificial Sequence: Synthetic peptide
SAVDSGGSTYYA

SEQ ID NO: 1030 - protein, 13 aa, Artificial Sequence
  Description of Artificial Sequence: Synthetic peptide
AAVNWSGGSTYYA

SEQ ID NO: 1031 - protein, 13 aa, Artificial Sequence
  Description of Artificial Sequence: Synthetic peptide
AAINWSAGYTAYA

SEQ ID NO: 1032 - protein, 13 aa, Artificial Sequence
  Description of Artificial Sequence: Synthetic peptide
AAINWNGGNTHYA

SEQ ID NO: 1033 - protein, 13 aa, Artificial Sequence
  Description of Artificial Sequence: Synthetic peptide
AAINWSGGYTYYA

SEQ ID NO: 1034 - protein, 13 aa, Artificial Sequence
  Description of Artificial Sequence: Synthetic peptide
AAINWTGGYTYYA

SEQ ID NO: 1035 - protein, 13 aa, Artificial Sequence
  Description of Artificial Sequence: Synthetic peptide
AAINWSAGYTAYA

SEQ ID NO: 1036 - protein, 13 aa, Artificial Sequence
  Description of Artificial Sequence: Synthetic peptide
AAISWRGGTTYYA

SEQ ID NO: 1037 - protein, 13 aa, Artificial Sequence
  Description of Artificial Sequence: Synthetic peptide
AGINWESGSTNYA

SEQ ID NO: 1038 - protein, 13 aa, Artificial Sequence
  Description of Artificial Sequence: Synthetic peptide
AAINWSADYTAYA

SEQ ID NO: 1039 - protein, 13 aa, Artificial Sequence
  Description of Artificial Sequence: Synthetic peptide
AAITRSGSSTVYA

SEQ ID NO: 1040 - protein, 13 aa, Artificial Sequence
  Description of Artificial Sequence: Synthetic peptide
AAINWSAGYTAYA

SEQ ID NO: 1041 - protein, 13 aa, Artificial Sequence
  Description of Artificial Sequence: Synthetic peptide
ATINWSGALTHYA

SEQ ID NO: 1042 - protein, 13 aa, Artificial Sequence
  Description of Artificial Sequence: Synthetic peptide
AAITWSGGRTRYA

SEQ ID NO: 1043 - protein, 13 aa, Artificial Sequence
  Description of Artificial Sequence: Synthetic peptide
ARILWTGASRNYA

SEQ ID NO: 1044 - protein, 13 aa, Artificial Sequence
  Description of Artificial Sequence: Synthetic peptide
AGINWSGNGVYYA

SEQ ID NO: 1045 - protein, 13 aa, Artificial Sequence
  Description of Artificial Sequence: Synthetic peptide
AAINWSGGTTPYA

SEQ ID NO: 1046 - protein, 13 aa, Artificial Sequence
  Description of Artificial Sequence: Synthetic peptide
AAINWSGGYTPYA

SEQ ID NO: 1047 - protein, 13 aa, Artificial Sequence
  Description of Artificial Sequence: Synthetic peptide
AAINWSGGSTDYA

SEQ ID NO: 1048 - protein, 13 aa, Artificial Sequence
  Description of Artificial Sequence: Synthetic peptide
AAINWSAGYTAYA

SEQ ID NO: 1049 - protein, 13 aa, Artificial Sequence
  Description of Artificial Sequence: Synthetic peptide
AAINWSGGSTRYA

SEQ ID NO: 1050 - protein, 13 aa, Artificial Sequence
  Description of Artificial Sequence: Synthetic peptide
AAINWSAGYTPYA

SEQ ID NO: 1051 - protein, 13 aa, Artificial Sequence
  Description of Artificial Sequence: Synthetic peptide
AAINWNAGYTAYA

SEQ ID NO: 1052 - protein, 13 aa, Artificial Sequence
  Description of Artificial Sequence: Synthetic peptide
GRINWSGGNTYYA

SEQ ID NO: 1053 - protein, 13 aa, Artificial Sequence
  Description of Artificial Sequence: Synthetic peptide
AAINWSAGYTAYA

SEQ ID NO: 1054 - protein, 13 aa, Artificial Sequence
  Description of Artificial Sequence: Synthetic peptide
AVVNWSGRRTYYA

SEQ ID NO: 1055 - protein, 13 aa, Artificial Sequence
  Description of Artificial Sequence: Synthetic peptide
SIISGSGGATYYA

SEQ ID NO: 1056 - protein, 13 aa, Artificial Sequence
  Description of Artificial Sequence: Synthetic peptide
SGISGSGDETYYA

SEQ ID NO: 1057 - protein, 13 aa, Artificial Sequence
  Description of Artificial Sequence: Synthetic peptide
SAISGSGDITYYA

SEQ ID NO: 1058 - protein, 13 aa, Artificial Sequence
  Description of Artificial Sequence: Synthetic peptide
SAITGTGDITYYA

SEQ ID NO: 1059 - protein, 13 aa, Artificial Sequence
  Description of Artificial Sequence: Synthetic peptide
SAISGSGDITYYA

SEQ ID NO: 1060 - protein, 13 aa, Artificial Sequence
  Description of Artificial Sequence: Synthetic peptide
SAISGSGDITYYA

SEQ ID NO: 1061 - protein, 13 aa, Artificial Sequence
  Description of Artificial Sequence: Synthetic peptide
SAITGSGDITYYA

SEQ ID NO: 1062 - protein, 13 aa, Artificial Sequence
  Description of Artificial Sequence: Synthetic peptide
SAISGSGDITYYA

SEQ ID NO: 1063 - protein, 13 aa, Artificial Sequence
  Description of Artificial Sequence: Synthetic peptide
STISGSGSTTYYA

SEQ ID NO: 1064 - protein, 13 aa, Artificial Sequence
  Description of Artificial Sequence: Synthetic peptide
SAITASGDITYYA

SEQ ID NO: 1065 - protein, 13 aa, Artificial Sequence
  Description of Artificial Sequence: Synthetic peptide
STISGSGGNTFYA

SEQ ID NO: 1066 - protein, 13 aa, Artificial Sequence
  Description of Artificial Sequence: Synthetic peptide
STISGSGGITFYA

SEQ ID NO: 1067 - protein, 13 aa, Artificial Sequence
  Description of Artificial Sequence: Synthetic peptide
SAISGSGDNTYYA

SEQ ID NO: 1068 - protein, 13 aa, Artificial Sequence
  Description of Artificial Sequence: Synthetic peptide
SAITGSGDITYYA

SEQ ID NO: 1069 - protein, 13 aa, Artificial Sequence
  Description of Artificial Sequence: Synthetic peptide
STISGSGGITFYA

SEQ ID NO: 1070 - protein, 13 aa, Artificial Sequence
  Description of Artificial Sequence: Synthetic peptide
AAISGSGGSTYYA

SEQ ID NO: 1071 - protein, 13 aa, Artificial Sequence
  Description of Artificial Sequence: Synthetic peptide
SAISGSGGSTNYA

SEQ ID NO: 1072 - protein, 13 aa, Artificial Sequence
  Description of Artificial Sequence: Synthetic peptide
SGISGSGGTTYYG

SEQ ID NO: 1073 - protein, 13 aa, Artificial Sequence
  Description of Artificial Sequence: Synthetic peptide
SGISGSGGTTYYG

SEQ ID NO: 1074 - protein, 13 aa, Artificial Sequence
  Description of Artificial Sequence: Synthetic peptide
SGISGSGAGTYYA

SEQ ID NO: 1075 - protein, 13 aa, Artificial Sequence
  Description of Artificial Sequence: Synthetic peptide
SGISGAGASTYYA

SEQ ID NO: 1076 - protein, 13 aa, Artificial Sequence
  Description of Artificial Sequence: Synthetic peptide
SGISGSGASTYYA

SEQ ID NO: 1077 - protein, 13 aa, Artificial Sequence
  Description of Artificial Sequence: Synthetic peptide
SGISGSGASTYYA

SEQ ID NO: 1078 - protein, 13 aa, Artificial Sequence
  Description of Artificial Sequence: Synthetic peptide
SGISGSGAGTYYA

SEQ ID NO: 1079 - protein, 13 aa, Artificial Sequence
  Description of Artificial Sequence: Synthetic peptide
SSISGGGASTYYA

SEQ ID NO: 1080 - protein, 13 aa, Artificial Sequence
  Description of Artificial Sequence: Synthetic peptide
SSISGGGASTYYA

SEQ ID NO: 1081 - protein, 13 aa, Artificial Sequence
  Description of Artificial Sequence: Synthetic peptide
SSISGGGASTYYA

SEQ ID NO: 1082 - protein, 13 aa, Artificial Sequence
  Description of Artificial Sequence: Synthetic peptide
SSISGGGASTYYA

SEQ ID NO: 1083 - protein, 13 aa, Artificial Sequence
  Description of Artificial Sequence: Synthetic peptide
SSISGGGASTYYA

SEQ ID NO: 1084 - protein, 13 aa, Artificial Sequence
  Description of Artificial Sequence: Synthetic peptide
SAISGSGGSRYYA

SEQ ID NO: 1085 - protein, 13 aa, Artificial Sequence
  Description of Artificial Sequence: Synthetic peptide
SIISGSGGATYYA

SEQ ID NO: 1086 - protein, 13 aa, Artificial Sequence
  Description of Artificial Sequence: Synthetic peptide
SAITASGDITYYA

SEQ ID NO: 1087 - protein, 13 aa, Artificial Sequence
  Description of Artificial Sequence: Synthetic peptide
SAISGSGDITYYA

SEQ ID NO: 1088 - protein, 13 aa, Artificial Sequence
  Description of Artificial Sequence: Synthetic peptide
SGISGSGDETYYA

SEQ ID NO: 1089 - protein, 13 aa, Artificial Sequence
  Description of Artificial Sequence: Synthetic peptide
SAISGSGDITYYA

SEQ ID NO: 1090 - protein, 13 aa, Artificial Sequence
  Description of Artificial Sequence: Synthetic peptide
STISGSGGNTFYA

SEQ ID NO: 1091 - protein, 13 aa, Artificial Sequence
  Description of Artificial Sequence: Synthetic peptide
SAITGSGDITYYA

SEQ ID NO: 1092 - protein, 13 aa, Artificial Sequence
  Description of Artificial Sequence: Synthetic peptide
STISGSGGITFYA

SEQ ID NO: 1093 - protein, 13 aa, Artificial Sequence
  Description of Artificial Sequence: Synthetic peptide
SAISGSGDNTYYA

SEQ ID NO: 1094 - protein, 13 aa, Artificial Sequence
  Description of Artificial Sequence: Synthetic peptide
SAITGTGDITYYA

SEQ ID NO: 1095 - protein, 13 aa, Artificial Sequence
  Description of Artificial Sequence: Synthetic peptide
SAITGSGDITYYA

SEQ ID NO: 1096 - protein, 13 aa, Artificial Sequence
  Description of Artificial Sequence: Synthetic peptide
SAISGSGDITYYA

SEQ ID NO: 1097 - protein, 13 aa, Artificial Sequence
  Description of Artificial Sequence: Synthetic peptide
SAISGSGDITYYA

SEQ ID NO: 1098 - protein, 13 aa, Artificial Sequence
  Description of Artificial Sequence: Synthetic peptide
STISGSGSTTYYA

SEQ ID NO: 1099 - protein, 13 aa, Artificial Sequence
  Description of Artificial Sequence: Synthetic peptide
STISGSGSTTYYA

SEQ ID NO: 1100 - protein, 13 aa, Artificial Sequence
  Description of Artificial Sequence: Synthetic peptide
SGISGSGDETYYA

SEQ ID NO: 1101 - protein, 13 aa, Artificial Sequence
  Description of Artificial Sequence: Synthetic peptide
SGITGSGDETYYA

SEQ ID NO: 1102 - protein, 13 aa, Artificial Sequence
  Description of Artificial Sequence: Synthetic peptide
SAISGSGGSSYYA

SEQ ID NO: 1103 - protein, 13 aa, Artificial Sequence
  Description of Artificial Sequence: Synthetic peptide
SGISGGGASTYYA

SEQ ID NO: 1104 - protein, 13 aa, Artificial Sequence
  Description of Artificial Sequence: Synthetic peptide
SSIGGSGSTTYYA

SEQ ID NO: 1105 - protein, 13 aa, Artificial Sequence
  Description of Artificial Sequence: Synthetic peptide
SAISGSSGSTYYA

SEQ ID NO: 1106 - protein, 13 aa, Artificial Sequence
  Description of Artificial Sequence: Synthetic peptide
STISGSGGNTFYA

SEQ ID NO: 1107 - protein, 13 aa, Artificial Sequence
  Description of Artificial Sequence: Synthetic peptide
SSISGGGASTYYA

SEQ ID NO: 1108 - protein, 13 aa, Artificial Sequence
  Description of Artificial Sequence: Synthetic peptide
SAISGSGGSRYYA

SEQ ID NO: 1109 - protein, 13 aa, Artificial Sequence
  Description of Artificial Sequence: Synthetic peptide
AAISGSGGSTYYA

SEQ ID NO: 1110 - protein, 13 aa, Artificial Sequence
  Description of Artificial Sequence: Synthetic peptide
SGISGSGGTTYYG

SEQ ID NO: 1111 - protein, 13 aa, Artificial Sequence
  Description of Artificial Sequence: Synthetic peptide
SGISGAGASTYYA

SEQ ID NO: 1112 - protein, 13 aa, Artificial Sequence
  Description of Artificial Sequence: Synthetic peptide
SGISGSGGTTYYG

SEQ ID NO: 1113 - protein, 13 aa, Artificial Sequence
  Description of Artificial Sequence: Synthetic peptide
SSISGGGASTYYA

SEQ ID NO: 1114 - protein, 13 aa, Artificial Sequence
  Description of Artificial Sequence: Synthetic peptide
SGISGSGASTYYA

SEQ ID NO: 1115 - protein, 13 aa, Artificial Sequence
  Description of Artificial Sequence: Synthetic peptide
SGISGSGAGTYYA

SEQ ID NO: 1116 - protein, 13 aa, Artificial Sequence
  Description of Artificial Sequence: Synthetic peptide
SSISGGGASTYYA

SEQ ID NO: 1117 - protein, 13 aa, Artificial Sequence
  Description of Artificial Sequence: Synthetic peptide
SGISGSGASTYYA

SEQ ID NO: 1118 - protein, 13 aa, Artificial Sequence
  Description of Artificial Sequence: Synthetic peptide
SAISGSGGSTNYA

SEQ ID NO: 1119 - protein, 13 aa, Artificial Sequence
  Description of Artificial Sequence: Synthetic peptide
SSISGGGASTYYA

SEQ ID NO: 1120 - protein, 13 aa, Artificial Sequence
  Description of Artificial Sequence: Synthetic peptide
SSISGGGASTYYA

SEQ ID NO: 1121 - protein, 13 aa, Artificial Sequence
  Description of Artificial Sequence: Synthetic peptide
SGISGSGAGTYYA

SEQ ID NO: 1122 - protein, 13 aa, Artificial Sequence
  Description of Artificial Sequence: Synthetic peptide
SAISGRGGGTYYA

SEQ ID NO: 1123 - protein, 13 aa, Artificial Sequence
  Description of Artificial Sequence: Synthetic peptide
STISGSGGITYYA

SEQ ID NO: 1124 - protein, 13 aa, Artificial Sequence
  Description of Artificial Sequence: Synthetic peptide
SAISGSGVDTYYA

SEQ ID NO: 1125 - protein, 13 aa, Artificial Sequence
  Description of Artificial Sequence: Synthetic peptide
STISTSGGNTYYA

SEQ ID NO: 1126 - protein, 13 aa, Artificial Sequence
  Description of Artificial Sequence: Synthetic peptide
SGISVSGGFTYYA

SEQ ID NO: 1127 - protein, 13 aa, Artificial Sequence
  Description of Artificial Sequence: Synthetic peptide
SGISGGGVSTYYA

SEQ ID NO: 1128 - protein, 10 aa, Artificial Sequence
  Description of Artificial Sequence: Synthetic peptide
SAISGSAFYA

SEQ ID NO: 1129 - protein, 13 aa, Artificial Sequence
  Description of Artificial Sequence: Synthetic peptide
SDISGSGGSTYYA

SEQ ID NO: 1130 - protein, 13 aa, Artificial Sequence
  Description of Artificial Sequence: Synthetic peptide
SFISGSGGSTYYA

SEQ ID NO: 1131 - protein, 13 aa, Artificial Sequence
  Description of Artificial Sequence: Synthetic peptide
SAISESGGSTYYA

SEQ ID NO: 1132 - protein, 13 aa, Artificial Sequence
  Description of Artificial Sequence: Synthetic peptide
SAITGSGGSTYYG

SEQ ID NO: 1133 - protein, 13 aa, Artificial Sequence
  Description of Artificial Sequence: Synthetic peptide
SGISGGGTSTYYA

SEQ ID NO: 1134 - protein, 13 aa, Artificial Sequence
  Description of Artificial Sequence: Synthetic peptide
SAISGSVGSTYYA

SEQ ID NO: 1135 - protein, 13 aa, Artificial Sequence
  Description of Artificial Sequence: Synthetic peptide
SAISGSGSNIYYA

SEQ ID NO: 1136 - protein, 13 aa, Artificial Sequence
  Description of Artificial Sequence: Synthetic peptide
ARISTSGGSTKYA

SEQ ID NO: 1137 - protein, 13 aa, Artificial Sequence
  Description of Artificial Sequence: Synthetic peptide
ARITWNGGSTYYA

SEQ ID NO: 1138 - protein, 13 aa, Artificial Sequence
  Description of Artificial Sequence: Synthetic peptide
AAVSWSGSGVYYA

SEQ ID NO: 1139 - protein, 13 aa, Artificial Sequence
  Description of Artificial Sequence: Synthetic peptide
GAVSWSGGTTVYA

SEQ ID NO: 1140 - protein, 13 aa, Artificial Sequence
  Description of Artificial Sequence: Synthetic peptide
AAINWSAGYTAYA

SEQ ID NO: 1141 - protein, 15 aa, Artificial Sequence
  Description of Artificial Sequence: Synthetic peptide
AAISWSGGSTYTAYA

SEQ ID NO: 1142 - protein, 13 aa, Artificial Sequence
  Description of Artificial Sequence: Synthetic peptide
ARILWTGASRNYA

SEQ ID NO: 1143 - protein, 13 aa, Artificial Sequence
  Description of Artificial Sequence: Synthetic peptide
AAISWNGDFTAYA

SEQ ID NO: 1144 - protein, 13 aa, Artificial Sequence
  Description of Artificial Sequence: Synthetic peptide
AGINWESGSTNYA

SEQ ID NO: 1145 - protein, 12 aa, Artificial Sequence
  Description of Artificial Sequence: Synthetic peptide
AAIGSGGYTDYA

SEQ ID NO: 1146 - protein, 12 aa, Artificial Sequence
  Description of Artificial Sequence: Synthetic peptide
SAVDSGGSTYYA

SEQ ID NO: 1147 - protein, 13 aa, Artificial Sequence
  Description of Artificial Sequence: Synthetic peptide
AAVTWSGGSTYYA

SEQ ID NO: 1148 - protein, 13 aa, Artificial Sequence
  Description of Artificial Sequence: Synthetic peptide
AAINWSAGYTPYA

SEQ ID NO: 1149 - protein, 13 aa, Artificial Sequence
  Description of Artificial Sequence: Synthetic peptide
AAIHWSAGYTRYA

SEQ ID NO: 1150 - protein, 13 aa, Artificial Sequence
  Description of Artificial Sequence: Synthetic peptide
AAINWSADYTPYA

SEQ ID NO: 1151 - protein, 13 aa, Artificial Sequence
  Description of Artificial Sequence: Synthetic peptide
AAINWSAGYTAYA

SEQ ID NO: 1152 - protein, 13 aa, Artificial Sequence
  Description of Artificial Sequence: Synthetic peptide
AAINWSGGSTDYA

SEQ ID NO: 1153 - protein, 13 aa, Artificial Sequence
  Description of Artificial Sequence: Synthetic peptide
AGINWSGGNTYYA

SEQ ID NO: 1154 - protein, 13 aa, Artificial Sequence
  Description of Artificial Sequence: Synthetic peptide
AAINWTGGYTSYA

SEQ ID NO: 1155 - protein, 13 aa, Artificial Sequence
  Description of Artificial Sequence: Synthetic peptide
AAINWSGGNTYYA

SEQ ID NO: 1156 - protein, 13 aa, Artificial Sequence
  Description of Artificial Sequence: Synthetic peptide
AAINWSGGYTYYA

SEQ ID NO: 1157 - protein, 13 aa, Artificial Sequence
  Description of Artificial Sequence: Synthetic peptide
ATINWSGALTHYA

SEQ ID NO: 1158 - protein, 13 aa, Artificial Sequence
  Description of Artificial Sequence: Synthetic peptide
AGVTWSGSSTFYA

SEQ ID NO: 1159 - protein, 13 aa, Artificial Sequence
  Description of Artificial Sequence: Synthetic peptide
AAISWSGGNTHYA

SEQ ID NO: 1160 - protein, 13 aa, Artificial Sequence
  Description of Artificial Sequence: Synthetic peptide
AAINWSAGYTAYA

SEQ ID NO: 1161 - protein, 13 aa, Artificial Sequence
  Description of Artificial Sequence: Synthetic peptide
AAVSGSGDDTYYA

SEQ ID NO: 1162 - protein, 13 aa, Artificial Sequence
  Description of Artificial Sequence: Synthetic peptide
AAINWSAGYTAYA

SEQ ID NO: 1163 - protein, 13 aa, Artificial Sequence
  Description of Artificial Sequence: Synthetic peptide
AAINWSGGYTPYA

SEQ ID NO: 1164 - protein, 13 aa, Artificial Sequence
  Description of Artificial Sequence: Synthetic peptide
AAINWSAGYTPYA

SEQ ID NO: 1165 - protein, 13 aa, Artificial Sequence
  Description of Artificial Sequence: Synthetic peptide
AAISWSGGTTRYA

SEQ ID NO: 1166 - protein, 13 aa, Artificial Sequence
  Description of Artificial Sequence: Synthetic peptide
AAINWSGDSTYYA

SEQ ID NO: 1167 - protein, 13 aa, Artificial Sequence
  Description of Artificial Sequence: Synthetic peptide
AAINWSGGTTRYA

SEQ ID NO: 1168 - protein, 13 aa, Artificial Sequence
  Description of Artificial Sequence: Synthetic peptide
AAIHWSGSSTRYA

SEQ ID NO: 1169 - protein, 13 aa, Artificial Sequence
  Description of Artificial Sequence: Synthetic peptide
GTINWSGGSTYYA

SEQ ID NO: 1170 - protein, 13 aa, Artificial Sequence
  Description of Artificial Sequence: Synthetic peptide
AAINWSGGYTPYA

SEQ ID NO: 1171 - protein, 13 aa, Artificial Sequence
  Description of Artificial Sequence: Synthetic peptide
AAINWNGGNTHYA

SEQ ID NO: 1172 - protein, 13 aa, Artificial Sequence
  Description of Artificial Sequence: Synthetic peptide
AAINWSGGTTRYA

SEQ ID NO: 1173 - protein, 13 aa, Artificial Sequence
  Description of Artificial Sequence: Synthetic peptide
AAINWSAGYTPYA

SEQ ID NO: 1174 - protein, 13 aa, Artificial Sequence
  Description of Artificial Sequence: Synthetic peptide
ASINWSGGSTYYA

SEQ ID NO: 1175 - protein, 13 aa, Artificial Sequence
  Description of Artificial Sequence: Synthetic peptide
AGISWNGGSIYYA

SEQ ID NO: 1176 - protein, 13 aa, Artificial Sequence
  Description of Artificial Sequence: Synthetic peptide
AAISWRGGTTYYA

SEQ ID NO: 1177 - protein, 13 aa, Artificial Sequence
  Description of Artificial Sequence: Synthetic peptide
AAINWSGGYTPYA

SEQ ID NO: 1178 - protein, 13 aa, Artificial Sequence
  Description of Artificial Sequence: Synthetic peptide
AAINWSGGSTRYA

SEQ ID NO: 1179 - protein, 13 aa, Artificial Sequence
  Description of Artificial Sequence: Synthetic peptide
AVINWSGGSTDYA

SEQ ID NO: 1180 - protein, 13 aa, Artificial Sequence
  Description of Artificial Sequence: Synthetic peptide
AAINWSGGTTPYA

SEQ ID NO: 1181 - protein, 13 aa, Artificial Sequence
  Description of Artificial Sequence: Synthetic peptide
AAVSWSGGNTYYA

SEQ ID NO: 1182 - protein, 13 aa, Artificial Sequence
  Description of Artificial Sequence: Synthetic peptide
AAINWTGGYTPYA

SEQ ID NO: 1183 - protein, 13 aa, Artificial Sequence
  Description of Artificial Sequence: Synthetic peptide
ATINWTAGYTYYA

SEQ ID NO: 1184 - protein, 13 aa, Artificial Sequence
  Description of Artificial Sequence: Synthetic peptide
AAINWSGGNTDYA

SEQ ID NO: 1185 - protein, 13 aa, Artificial Sequence
  Description of Artificial Sequence: Synthetic peptide
AAINWSGGNTYYA

SEQ ID NO: 1186 - protein, 13 aa, Artificial Sequence
  Description of Artificial Sequence: Synthetic peptide
AGINWSGNGVYYA

SEQ ID NO: 1187 - protein, 13 aa, Artificial Sequence
  Description of Artificial Sequence: Synthetic peptide
APINWSGGSTYYA

SEQ ID NO: 1188 - protein, 13 aa, Artificial Sequence
  Description of Artificial Sequence: Synthetic peptide
AVVNWSGRRTYYA

SEQ ID NO: 1189 - protein, 13 aa, Artificial Sequence
  Description of Artificial Sequence: Synthetic peptide
AAITRSGSSTVYA

SEQ ID NO: 1190 - protein, 13 aa, Artificial Sequence
  Description of Artificial Sequence: Synthetic peptide
AAINWTGGSTYYA

SEQ ID NO: 1191 - protein, 13 aa, Artificial Sequence
  Description of Artificial Sequence: Synthetic peptide
AAINWSAGYTAYA

SEQ ID NO: 1192 - protein, 13 aa, Artificial Sequence
  Description of Artificial Sequence: Synthetic peptide
GSINWSGGSTYYA

SEQ ID NO: 1193 - protein, 13 aa, Artificial Sequence
  Description of Artificial Sequence: Synthetic peptide
AGMTWSGSSTFYA

SEQ ID NO: 1194 - protein, 13 aa, Artificial Sequence
  Description of Artificial Sequence: Synthetic peptide
AAINWSGDYTDYA

SEQ ID NO: 1195 - protein, 13 aa, Artificial Sequence
  Description of Artificial Sequence: Synthetic peptide
GGINWSGGYTYYA

SEQ ID NO: 1196 - protein, 13 aa, Artificial Sequence
  Description of Artificial Sequence: Synthetic peptide
AAVNWSGGSTYYA

SEQ ID NO: 1197 - protein, 13 aa, Artificial Sequence
  Description of Artificial Sequence: Synthetic peptide
AAINWSGGYTRYA

SEQ ID NO: 1198 - protein, 13 aa, Artificial Sequence
  Description of Artificial Sequence: Synthetic peptide
AAINWSGGYTPYA

SEQ ID NO: 1199 - protein, 13 aa, Artificial Sequence
  Description of Artificial Sequence: Synthetic peptide
AAINWSAGYTAYA

SEQ ID NO: 1200 - protein, 13 aa, Artificial Sequence
  Description of Artificial Sequence: Synthetic peptide
AAINWSGGYTHYA

SEQ ID NO: 1201 - protein, 13 aa, Artificial Sequence
  Description of Artificial Sequence: Synthetic peptide
AAITWSGGRTRYA

SEQ ID NO: 1202 - protein, 13 aa, Artificial Sequence
  Description of Artificial Sequence: Synthetic peptide
AAINWSGGYTAYA

SEQ ID NO: 1203 - protein, 13 aa, Artificial Sequence
  Description of Artificial Sequence: Synthetic peptide
AAIHWSGSSTRYA

SEQ ID NO: 1204 - protein, 13 aa, Artificial Sequence
  Description of Artificial Sequence: Synthetic peptide
AAINWSGGTTYYA

SEQ ID NO: 1205 - protein, 13 aa, Artificial Sequence
  Description of Artificial Sequence: Synthetic peptide
AAINWSGDNTHYA

SEQ ID NO: 1206 - protein, 12 aa, Artificial Sequence
  Description of Artificial Sequence: Synthetic peptide
ASISSGGTTAYA

SEQ ID NO: 1207 - protein, 13 aa, Artificial Sequence
  Description of Artificial Sequence: Synthetic peptide
GRINWSGGNTYYA

SEQ ID NO: 1208 - protein, 13 aa, Artificial Sequence
  Description of Artificial Sequence: Synthetic peptide
GGISWSGGNTYYA

SEQ ID NO: 1209 - protein, 13 aa, Artificial Sequence
  Description of Artificial Sequence: Synthetic peptide
AAINWSGGSTYYA

SEQ ID NO: 1210 - protein, 13 aa, Artificial Sequence
  Description of Artificial Sequence: Synthetic peptide
AAINWSGGYTYYA

SEQ ID NO: 1211 - protein, 13 aa, Artificial Sequence
  Description of Artificial Sequence: Synthetic peptide
AAINWSADYTAYA

SEQ ID NO: 1212 - protein, 13 aa, Artificial Sequence
  Description of Artificial Sequence: Synthetic peptide
AAINWSGSSTYYA

SEQ ID NO: 1213 - protein, 13 aa, Artificial Sequence
  Description of Artificial Sequence: Synthetic peptide
AAINWIAGYTADA

SEQ ID NO: 1214 - protein, 13 aa, Artificial Sequence
  Description of Artificial Sequence: Synthetic peptide
AAINWSGGNTPYA

SEQ ID NO: 1215 - protein, 13 aa, Artificial Sequence
  Description of Artificial Sequence: Synthetic peptide
AAINWSGDNTHYA

SEQ ID NO: 1216 - protein, 13 aa, Artificial Sequence
  Description of Artificial Sequence: Synthetic peptide
AAINWSAGYTAYA

SEQ ID NO: 1217 - protein, 13 aa, Artificial Sequence
  Description of Artificial Sequence: Synthetic peptide
AAINWNAGYTAYA

SEQ ID NO: 1218 - protein, 13 aa, Artificial Sequence
  Description of Artificial Sequence: Synthetic peptide
AAINWTGGYTYYA

SEQ ID NO: 1219 - protein, 13 aa, Artificial Sequence
  Description of Artificial Sequence: Synthetic peptide
AAINWSAGYTAYA

SEQ ID NO: 1220 - protein, 13 aa, Artificial Sequence
  Description of Artificial Sequence: Synthetic peptide
AAINWSGDNTHYA

SEQ ID NO: 1221 - protein, 13 aa, Artificial Sequence
  Description of Artificial Sequence: Synthetic peptide
AAINWSAGYTPYA

SEQ ID NO: 1222 - protein, 13 aa, Artificial Sequence
  Description of Artificial Sequence: Synthetic peptide
AAINWSAGYTAYA

SEQ ID NO: 1223 - protein, 13 aa, Artificial Sequence
  Description of Artificial Sequence: Synthetic peptide
AAINWSGGNTYYA

SEQ ID NO: 1224 - protein, 13 aa, Artificial Sequence
  Description of Artificial Sequence: Synthetic peptide
AAVSSLGPFTRYA

SEQ ID NO: 1225 - protein, 13 aa, Artificial Sequence
  Description of Artificial Sequence: Synthetic peptide
AAINWSGGSTYYA

SEQ ID NO: 1226 - protein, 13 aa, Artificial Sequence
  Description of Artificial Sequence: Synthetic peptide
ARILWTGASRSYA

SEQ ID NO: 1227 - protein, 13 aa, Artificial Sequence
  Description of Artificial Sequence: Synthetic peptide
AAINMSGDDSAYA

SEQ ID NO: 1228 - protein, 10 aa, Artificial Sequence
  Description of Artificial Sequence: Synthetic peptide
ARISGSTFYA

SEQ ID NO: 1229 - protein, 13 aa, Artificial Sequence
  Description of Artificial Sequence: Synthetic peptide
GRINWSGGNTYYA

SEQ ID NO: 1230 - protein, 13 aa, Artificial Sequence
  Description of Artificial Sequence: Synthetic peptide
AAITWSGGSTAYA

SEQ ID NO: 1231 - protein, 13 aa, Artificial Sequence
  Description of Artificial Sequence: Synthetic peptide
AAITDNGGSKYYA

SEQ ID NO: 1232 - protein, 13 aa, Artificial Sequence
  Description of Artificial Sequence: Synthetic peptide
AAINWSGASTYYA

SEQ ID NO: 1233 - protein, 13 aa, Artificial Sequence
  Description of Artificial Sequence: Synthetic peptide
AAISWSEDNTYYA

SEQ ID NO: 1234 - protein, 13 aa, Artificial Sequence
  Description of Artificial Sequence: Synthetic peptide
AAVSGSGDDTYYA

SEQ ID NO: 1235 - protein, 13 aa, Artificial Sequence
  Description of Artificial Sequence: Synthetic peptide
AAISASGRRTDYA

SEQ ID NO: 1236 - protein, 12 aa, Artificial Sequence
  Description of Artificial Sequence: Synthetic peptide
AAISTGGSTIYA

SEQ ID NO: 1237 - protein, 13 aa, Artificial Sequence
  Description of Artificial Sequence: Synthetic peptide
AAISNSGLSTYYA

SEQ ID NO: 1238 - protein, 13 aa, Artificial Sequence
  Description of Artificial Sequence: Synthetic peptide
ATMRWSTGSTYYA

SEQ ID NO: 1239 - protein, 12 aa, Artificial Sequence
  Description of Artificial Sequence: Synthetic peptide
AAINNFGTTKYA

SEQ ID NO: 1240 - protein, 13 aa, Artificial Sequence
  Description of Artificial Sequence: Synthetic peptide
AAISWSGGSTAYA

SEQ ID NO: 1241 - protein, 13 aa, Artificial Sequence
  Description of Artificial Sequence: Synthetic peptide
AGINWSGDTPYYA

SEQ ID NO: 1242 - protein, 13 aa, Artificial Sequence
  Description of Artificial Sequence: Synthetic peptide
ASINWGGGNTYYA

SEQ ID NO: 1243 - protein, 13 aa, Artificial Sequence
  Description of Artificial Sequence: Synthetic peptide
AAISWSGDNTHYA

SEQ ID NO: 1244 - protein, 12 aa, Artificial Sequence
  Description of Artificial Sequence: Synthetic peptide
ATINGDDYTYYA

SEQ ID NO: 1245 - protein, 13 aa, Artificial Sequence
  Description of Artificial Sequence: Synthetic peptide
AAIRWSSSSTVYA

SEQ ID NO: 1246 - protein, 12 aa, Artificial Sequence
  Description of Artificial Sequence: Synthetic peptide
AAITSGGSTNYA

SEQ ID NO: 1247 - protein, 13 aa, Artificial Sequence
  Description of Artificial Sequence: Synthetic peptide
AAIHWNGDSTAYA

SEQ ID NO: 1248 - protein, 13 aa, Artificial Sequence
  Description of Artificial Sequence: Synthetic peptide
AAISGSGGSTAYA

SEQ ID NO: 1249 - protein, 12 aa, Artificial Sequence
  Description of Artificial Sequence: Synthetic peptide
AAITSSGSTNYA

SEQ ID NO: 1250 - protein, 13 aa, Artificial Sequence
  Description of Artificial Sequence: Synthetic peptide
ASINWGGGNTIYA

SEQ ID NO: 1251 - protein, 13 aa, Artificial Sequence
  Description of Artificial Sequence: Synthetic peptide
AAVSSLGPFTRYA

SEQ ID NO: 1252 - protein, 12 aa, Artificial Sequence
  Description of Artificial Sequence: Synthetic peptide
AAITNGGSTYYA

SEQ ID NO: 1253 - protein, 12 aa, Artificial Sequence
  Description of Artificial Sequence: Synthetic peptide
AAIDWDGSTAYA

SEQ ID NO: 1254 - protein, 12 aa, Artificial Sequence
  Description of Artificial Sequence: Synthetic peptide
AYYTSGGSIDYA

SEQ ID NO: 1255 - protein, 13 aa, Artificial Sequence
  Description of Artificial Sequence: Synthetic peptide
AAISSSGSSTVYA

SEQ ID NO: 1256 - protein, 13 aa, Artificial Sequence
  Description of Artificial Sequence: Synthetic peptide
ATITWSGDSTYYA

SEQ ID NO: 1257 - protein, 13 aa, Artificial Sequence
  Description of Artificial Sequence: Synthetic peptide
SAISWSTGSTYYA

SEQ ID NO: 1258 - protein, 13 aa, Artificial Sequence
  Description of Artificial Sequence: Synthetic peptide
AAISMSGDDTIYA

SEQ ID NO: 1259 - protein, 13 aa, Artificial Sequence
  Description of Artificial Sequence: Synthetic peptide
AVINWSGARTYYA

SEQ ID NO: 1260 - protein, 13 aa, Artificial Sequence
  Description of Artificial Sequence: Synthetic peptide
AAINWSGGSTAYA

SEQ ID NO: 1261 - protein, 13 aa, Artificial Sequence
  Description of Artificial Sequence: Synthetic peptide
GAIHWSGGRTYYA

SEQ ID NO: 1262 - protein, 13 aa, Artificial Sequence
  Description of Artificial Sequence: Synthetic peptide
AAINWSGARTAYA

SEQ ID NO: 1263 - protein, 13 aa, Artificial Sequence
  Description of Artificial Sequence: Synthetic peptide
AAISSRDGSTIYA

SEQ ID NO: 1264 - protein, 17 aa, Artificial Sequence
  Description of Artificial Sequence: Synthetic peptide
AAISIASGASGGTTNYA

SEQ ID NO: 1265 - protein, 13 aa, Artificial Sequence
  Description of Artificial Sequence: Synthetic peptide
ARITWNGGSTFYA

SEQ ID NO: 1266 - protein, 13 aa, Artificial Sequence
  Description of Artificial Sequence: Synthetic peptide
AAISWLGESTYYA

SEQ ID NO: 1267 - protein, 13 aa, Artificial Sequence
  Description of Artificial Sequence: Synthetic peptide
AAINWNGGYTAYA

SEQ ID NO: 1268 - protein, 15 aa, Artificial Sequence
  Description of Artificial Sequence: Synthetic peptide
AAISWTGVSTYTAYA

SEQ ID NO: 1269 - protein, 13 aa, Artificial Sequence
  Description of Artificial Sequence: Synthetic peptide
AAISWSGVGTAYA

SEQ ID NO: 1270 - protein, 13 aa, Artificial Sequence
  Description of Artificial Sequence: Synthetic peptide
GAINWLSESTYYA

SEQ ID NO: 1271 - protein, 13 aa, Artificial Sequence
  Description of Artificial Sequence: Synthetic peptide
AAINWSGGSTYYA

SEQ ID NO: 1272 - protein, 13 aa, Artificial Sequence
  Description of Artificial Sequence: Synthetic peptide
AAISMSGDDAAYA

SEQ ID NO: 1273 - protein, 13 aa, Artificial Sequence
  Description of Artificial Sequence: Synthetic peptide
AAISSRDGSTAYA

SEQ ID NO: 1274 - protein, 13 aa, Artificial Sequence
  Description of Artificial Sequence: Synthetic peptide
AAISWDGGATAYA

SEQ ID NO: 1275 - protein, 12 aa, Artificial Sequence
  Description of Artificial Sequence: Synthetic peptide
ASIRSGARTYYA

SEQ ID NO: 1276 - protein, 13 aa, Artificial Sequence
  Description of Artificial Sequence: Synthetic peptide
AAISWSGGSTVYA

SEQ ID NO: 1277 - protein, 13 aa, Artificial Sequence
  Description of Artificial Sequence: Synthetic peptide
AAISWDGGATAYA

SEQ ID NO: 1278 - protein, 12 aa, Artificial Sequence
  Description of Artificial Sequence: Synthetic peptide
AIKFSGGTTDYA

SEQ ID NO: 1279 - protein, 13 aa, Artificial Sequence
  Description of Artificial Sequence: Synthetic peptide
AGISWSGDSTLYA

SEQ ID NO: 1280 - protein, 13 aa, Artificial Sequence
  Description of Artificial Sequence: Synthetic peptide
AVITCSGGSTDYA

SEQ ID NO: 1281 - protein, 18 aa, Artificial Sequence
  Description of Artificial Sequence: Synthetic peptide
AEITEGGISPSGDNIYYA

SEQ ID NO: 1282 - protein, 12 aa, Artificial Sequence
  Description of Artificial Sequence: Synthetic peptide
AAINNFGTTKYA

SEQ ID NO: 1283 - protein, 12 aa, Artificial Sequence
  Description of Artificial Sequence: Synthetic peptide
AAIHSGGSTNYA

SEQ ID NO: 1284 - protein, 13 aa, Artificial Sequence
  Description of Artificial Sequence: Synthetic peptide
SSIHWGGRGTNYA

SEQ ID NO: 1285 - protein, 13 aa, Artificial Sequence
  Description of Artificial Sequence: Synthetic peptide
AHIPRSTYSPYYA

SEQ ID NO: 1286 - protein, 12 aa, Artificial Sequence
  Description of Artificial Sequence: Synthetic peptide
AAISSYSHTAYA

SEQ ID NO: 1287 - protein, 12 aa, Artificial Sequence
  Description of Artificial Sequence: Synthetic peptide
ASISSGGGINYA

SEQ ID NO: 1288 - protein, 12 aa, Artificial Sequence
  Description of Artificial Sequence: Synthetic peptide
AINRSTGSTSYA

SEQ ID NO: 1289 - protein, 12 aa, Artificial Sequence
  Description of Artificial Sequence: Synthetic peptide
AAIRSSGGLFYA

SEQ ID NO: 1290 - protein, 13 aa, Artificial Sequence
  Description of Artificial Sequence: Synthetic peptide
SAIRWNGGNTAYA

SEQ ID NO: 1291 - protein, 12 aa, Artificial Sequence
  Description of Artificial Sequence: Synthetic peptide
ATIRWTNSTDYA

SEQ ID NO: 1292 - protein, 12 aa, Artificial Sequence
  Description of Artificial Sequence: Synthetic peptide
AAIHSGGATVYA

SEQ ID NO: 1293 - protein, 13 aa, Artificial Sequence
  Description of Artificial Sequence: Synthetic peptide
AGIRWSDVYTQYA

SEQ ID NO: 1294 - protein, 13 aa, Artificial Sequence
  Description of Artificial Sequence: Synthetic peptide
AAIHWSGGSTIYA

SEQ ID NO: 1295 - protein, 13 aa, Artificial Sequence
  Description of Artificial Sequence: Synthetic peptide
ASINWSGGSTYYA

SEQ ID NO: 1296 - protein, 12 aa, Artificial Sequence
  Description of Artificial Sequence: Synthetic peptide
AAISPSAFTEYA

SEQ ID NO: 1297 - protein, 12 aa, Artificial Sequence
  Description of Artificial Sequence: Synthetic peptide
AHISTGGATNYA

SEQ ID NO: 1298 - protein, 13 aa, Artificial Sequence
  Description of Artificial Sequence: Synthetic peptide
AAINWSDSRTDYA

SEQ ID NO: 1299 - protein, 13 aa, Artificial Sequence
  Description of Artificial Sequence: Synthetic peptide
AAISWSGESTLYA

SEQ ID NO: 1300 - protein, 12 aa, Artificial Sequence
  Description of Artificial Sequence: Synthetic peptide
AAISSYSHTAYA

SEQ ID NO: 1301 - protein, 13 aa, Artificial Sequence
  Description of Artificial Sequence: Synthetic peptide
AAIHWSGDSTLYA

SEQ ID NO: 1302 - protein, 12 aa, Artificial Sequence
  Description of Artificial Sequence: Synthetic peptide
ARIYTGGDTIYA

SEQ ID NO: 1303 - protein, 12 aa, Artificial Sequence
  Description of Artificial Sequence: Synthetic peptide
ATITPGGNTNYA

SEQ ID NO: 1304 - protein, 12 aa, Artificial Sequence
  Description of Artificial Sequence: Synthetic peptide
AEITAGGSTYYA

SEQ ID NO: 1305 - protein, 12 aa, Artificial Sequence
  Description of Artificial Sequence: Synthetic peptide
ASVLRGGYTWYA

SEQ ID NO: 1306 - protein, 13 aa, Artificial Sequence
  Description of Artificial Sequence: Synthetic peptide
AGIRWTDAYTEYA

SEQ ID NO: 1307 - protein, 13 aa, Artificial Sequence
  Description of Artificial Sequence: Synthetic peptide
AVINWTGESTLYA

SEQ ID NO: 1308 - protein, 15 aa, Artificial Sequence
  Description of Artificial Sequence: Synthetic peptide
AALGWSGVTTYHYYA

SEQ ID NO: 1309 - protein, 13 aa, Artificial Sequence
  Description of Artificial Sequence: Synthetic peptide
ATIMWSGNTTYYA

SEQ ID NO: 1310 - protein, 14 aa, Artificial Sequence
  Description of Artificial Sequence: Synthetic peptide
AAISWSGGDNTYYA

SEQ ID NO: 1311 - protein, 13 aa, Artificial Sequence
  Description of Artificial Sequence: Synthetic peptide
AGISWNGGSTNYA

SEQ ID NO: 1312 - protein, 12 aa, Artificial Sequence
  Description of Artificial Sequence: Synthetic peptide
AAISCGGGSTYA

SEQ ID NO: 1313 - protein, 13 aa, Artificial Sequence
  Description of Artificial Sequence: Synthetic peptide
GGISRSGATTNYA

SEQ ID NO: 1314 - protein, 12 aa, Artificial Sequence
  Description of Artificial Sequence: Synthetic peptide
ASISSQGRTNYA

SEQ ID NO: 1315 - protein, 13 aa, Artificial Sequence
  Description of Artificial Sequence: Synthetic peptide
AGIRWTDAYTEYA

SEQ ID NO: 1316 - protein, 13 aa, Artificial Sequence
  Description of Artificial Sequence: Synthetic peptide
AAIHWSGLTTFYA

SEQ ID NO: 1317 - protein, 20 aa, Artificial Sequence
  Description of Artificial Sequence: Synthetic peptide
AWINNRGTTDYADSGSTYYA

SEQ ID NO: 1318 - protein, 16 aa, Artificial Sequence
  Description of Artificial Sequence: Synthetic peptide
ASIGYSGRSNSYNYYA

SEQ ID NO: 1319 - protein, 12 aa, Artificial Sequence
  Description of Artificial Sequence: Synthetic peptide
AAITSGGAPHYA

SEQ ID NO: 1320 - protein, 12 aa, Artificial Sequence
  Description of Artificial Sequence: Synthetic peptide
AAIHWSGLTSYA

SEQ ID NO: 1321 - protein, 13 aa, Artificial Sequence
  Description of Artificial Sequence: Synthetic peptide
AAISWSGESTQYA

SEQ ID NO: 1322 - protein, 15 aa, Artificial Sequence
  Description of Artificial Sequence: Synthetic peptide
AAIHWSGDSTHRNYA

SEQ ID NO: 1323 - protein, 13 aa, Artificial Sequence
  Description of Artificial Sequence: Synthetic peptide
TAINWSGARTAYA

SEQ ID NO: 1324 - protein, 13 aa, Artificial Sequence
  Description of Artificial Sequence: Synthetic peptide
AGIRWSDAYTEYA

SEQ ID NO: 1325 - protein, 13 aa, Artificial Sequence
  Description of Artificial Sequence: Synthetic peptide
ASISQSGAATAYA

SEQ ID NO: 1326 - protein, 12 aa, Artificial Sequence
  Description of Artificial Sequence: Synthetic peptide
AAITSGGTPHYA

SEQ ID NO: 1327 - protein, 12 aa, Artificial Sequence
  Description of Artificial Sequence: Synthetic peptide
ATITPGGNTNYA

SEQ ID NO: 1328 - protein, 13 aa, Artificial Sequence
  Description of Artificial Sequence: Synthetic peptide
ATITFSGARTAYA

SEQ ID NO: 1329 - protein, 12 aa, Artificial Sequence
  Description of Artificial Sequence: Synthetic peptide
AAIRRSAVTNYA

SEQ ID NO: 1330 - protein, 13 aa, Artificial Sequence
  Description of Artificial Sequence: Synthetic peptide
AVISWTGESTLYA

SEQ ID NO: 1331 - protein, 13 aa, Artificial Sequence
  Description of Artificial Sequence: Synthetic peptide
AAITWSGGWRYYA

SEQ ID NO: 1332 - protein, 12 aa, Artificial Sequence
  Description of Artificial Sequence: Synthetic peptide
ARIFGGDRTLYA

SEQ ID NO: 1333 - protein, 10 aa, Artificial Sequence
  Description of Artificial Sequence: Synthetic peptide
GCIGWITYYA

SEQ ID NO: 1334 - protein, 13 aa, Artificial Sequence
  Description of Artificial Sequence: Synthetic peptide
AGIRWTDAYTEYA

SEQ ID NO: 1335 - protein, 13 aa, Artificial Sequence
  Description of Artificial Sequence: Synthetic peptide
SCISNIDGSTYYA

SEQ ID NO: 1336 - protein, 13 aa, Artificial Sequence
  Description of Artificial Sequence: Synthetic peptide
AAIMWSGSHRNYA

SEQ ID NO: 1337 - protein, 12 aa, Artificial Sequence
  Description of Artificial Sequence: Synthetic peptide
TGISPSAFTEYA

SEQ ID NO: 1338 - protein, 13 aa, Artificial Sequence
  Description of Artificial Sequence: Synthetic peptide
TGINWSGGSTTYA

SEQ ID NO: 1339 - protein, 13 aa, Artificial Sequence
  Description of Artificial Sequence: Synthetic peptide
AALGWSGGSTDYA

SEQ ID NO: 1340 - protein, 12 aa, Artificial Sequence
  Description of Artificial Sequence: Synthetic peptide
ARIYTGGDTLYA

SEQ ID NO: 1341 - protein, 12 aa, Artificial Sequence
  Description of Artificial Sequence: Synthetic peptide
AAIDSDGSTDYA

SEQ ID NO: 1342 - protein, 13 aa, Artificial Sequence
  Description of Artificial Sequence: Synthetic peptide
AAINWNGGTTLYA

SEQ ID NO: 1343 - protein, 13 aa, Artificial Sequence
  Description of Artificial Sequence: Synthetic peptide
AGITSSVGVTNYA

SEQ ID NO: 1344 - protein, 13 aa, Artificial Sequence
  Description of Artificial Sequence: Synthetic peptide
AAISGSENVTSYA

SEQ ID NO: 1345 - protein, 12 aa, Artificial Sequence
  Description of Artificial Sequence: Synthetic peptide
ATINSLGGTSYA

SEQ ID NO: 1346 - protein, 11 aa, Artificial Sequence
  Description of Artificial Sequence: Synthetic peptide
TVISGVGTSYA

SEQ ID NO: 1347 - protein, 12 aa, Artificial Sequence
  Description of Artificial Sequence: Synthetic peptide
ATINEYGGRNYA

SEQ ID NO: 1348 - protein, 13 aa, Artificial Sequence
  Description of Artificial Sequence: Synthetic peptide
AAISRSGSLTSYA

SEQ ID NO: 1349 - protein, 12 aa, Artificial Sequence
  Description of Artificial Sequence: Synthetic peptide
ASTNSAGSTNYA

SEQ ID NO: 1350 - protein, 13 aa, Artificial Sequence
  Description of Artificial Sequence: Synthetic peptide
AAISWSGGSTAYA

SEQ ID NO: 1351 - protein, 12 aa, Artificial Sequence
  Description of Artificial Sequence: Synthetic peptide
ATINWSGVTAYA

SEQ ID NO: 1352 - protein, 12 aa, Artificial Sequence
  Description of Artificial Sequence: Synthetic peptide
AIITTGGRTTYA

SEQ ID NO: 1353 - protein, 12 aa, Artificial Sequence
  Description of Artificial Sequence: Synthetic peptide
SAIDSEGRTSYA

SEQ ID NO: 1354 - protein, 13 aa, Artificial Sequence
  Description of Artificial Sequence: Synthetic peptide
AAISRSGGFGSYA

SEQ ID NO: 1355 - protein, 13 aa, Artificial Sequence
  Description of Artificial Sequence: Synthetic peptide
ATIGWSGANTYYA

SEQ ID NO: 1356 - protein, 13 aa, Artificial Sequence
  Description of Artificial Sequence: Synthetic peptide
AAISGSENVTSYA

SEQ ID NO: 1357 - protein, 13 aa, Artificial Sequence
  Description of Artificial Sequence: Synthetic peptide
AHIPRSTYSPYYA

SEQ ID NO: 1358 - protein, 13 aa, Artificial Sequence
  Description of Artificial Sequence: Synthetic peptide
AAVSWDGRNTYYA

SEQ ID NO: 1359 - protein, 13 aa, Artificial Sequence
  Description of Artificial Sequence: Synthetic peptide
AAVRWSDDYTYYA

SEQ ID NO: 1360 - protein, 13 aa, Artificial Sequence
  Description of Artificial Sequence: Synthetic peptide
AHISWSGGSTYYA

SEQ ID NO: 1361 - protein, 12 aa, Artificial Sequence
  Description of Artificial Sequence: Synthetic peptide
AGVINDGSTVYA

SEQ ID NO: 1362 - protein, 13 aa, Artificial Sequence
  Description of Artificial Sequence: Synthetic peptide
AGMMWSGGTTTYA

SEQ ID NO: 1363 - protein, 13 aa, Artificial Sequence
  Description of Artificial Sequence: Synthetic peptide
AAISPSAVTTYYA

SEQ ID NO: 1364 - protein, 13 aa, Artificial Sequence
  Description of Artificial Sequence: Synthetic peptide
AAITWNGASTSYA

SEQ ID NO: 1365 - protein, 16 aa, Artificial Sequence
  Description of Artificial Sequence: Synthetic peptide
AAITSSGSNIDYTYYA

SEQ ID NO: 1366 - protein, 12 aa, Artificial Sequence
  Description of Artificial Sequence: Synthetic peptide
ATIHSSGSTSYA

SEQ ID NO: 1367 - protein, 13 aa, Artificial Sequence
  Description of Artificial Sequence: Synthetic peptide
ALINRSGGGINYA

SEQ ID NO: 1368 - protein, 13 aa, Artificial Sequence
  Description of Artificial Sequence: Synthetic peptide
AAINWSGDNTHYA

SEQ ID NO: 1369 - protein, 12 aa, Artificial Sequence
  Description of Artificial Sequence: Synthetic peptide
AAISRFGSTYYA

SEQ ID NO: 1370 - protein, 12 aa, Artificial Sequence
  Description of Artificial Sequence: Synthetic peptide
ATINTGGGTNYA

SEQ ID NO: 1371 - protein, 12 aa, Artificial Sequence
  Description of Artificial Sequence: Synthetic peptide
ASISRSGTTYYA

SEQ ID NO: 1372 - protein, 12 aa, Artificial Sequence
  Description of Artificial Sequence: Synthetic peptide
ATITSDDRTNYA

SEQ ID NO: 1373 - protein, 13 aa, Artificial Sequence
  Description of Artificial Sequence: Synthetic peptide
AAIIWTGESTLDA

SEQ ID NO: 1374 - protein, 12 aa, Artificial Sequence
  Description of Artificial Sequence: Synthetic peptide
ATINWSGVTAYA

SEQ ID NO: 1375 - protein, 13 aa, Artificial Sequence
  Description of Artificial Sequence: Synthetic peptide
ASITWSSANTYYA

SEQ ID NO: 1376 - protein, 13 aa, Artificial Sequence
  Description of Artificial Sequence: Synthetic peptide
ALISWSGGSTYYA

SEQ ID NO: 1377 - protein, 12 aa, Artificial Sequence
  Description of Artificial Sequence: Synthetic peptide
ATINTGGQPNYA

SEQ ID NO: 1378 - protein, 13 aa, Artificial Sequence
  Description of Artificial Sequence: Synthetic peptide
AHISWSSKSTYYA

SEQ ID NO: 1379 - protein, 13 aa, Artificial Sequence
  Description of Artificial Sequence: Synthetic peptide
AAISMSGDDTIYA

SEQ ID NO: 1380 - protein, 13 aa, Artificial Sequence
  Description of Artificial Sequence: Synthetic peptide
TAITWSGDSTNYA

SEQ ID NO: 1381 - protein, 12 aa, Artificial Sequence
  Description of Artificial Sequence: Synthetic peptide
ATINSLGGTNYA

SEQ ID NO: 1382 - protein, 12 aa, Artificial Sequence
  Description of Artificial Sequence: Synthetic peptide
AVISSLSSKSYA

SEQ ID NO: 1383 - protein, 13 aa, Artificial Sequence
  Description of Artificial Sequence: Synthetic peptide
AAISWSGGSTAYA

SEQ ID NO: 1384 - protein, 13 aa, Artificial Sequence
  Description of Artificial Sequence: Synthetic peptide
ARVWWNGGSAYYA

SEQ ID NO: 1385 - protein, 12 aa, Artificial Sequence
  Description of Artificial Sequence: Synthetic peptide
ASINEYGGRNYA

SEQ ID NO: 1386 - protein, 12 aa, Artificial Sequence
  Description of Artificial Sequence: Synthetic peptide
AVITSGGSTNYA

SEQ ID NO: 1387 - protein, 13 aa, Artificial Sequence
  Description of Artificial Sequence: Synthetic peptide
ASVNWDASQINYA

SEQ ID NO: 1388 - protein, 13 aa, Artificial Sequence
  Description of Artificial Sequence: Synthetic peptide
GRITWTDGSTYYA

SEQ ID NO: 1389 - protein, 13 aa, Artificial Sequence
  Description of Artificial Sequence: Synthetic peptide
TLISWSSGRTSYA

SEQ ID NO: 1390 - protein, 12 aa, Artificial Sequence
  Description of Artificial Sequence: Synthetic peptide
ALIRRDGSTIYA

SEQ ID NO: 1391 - protein, 12 aa, Artificial Sequence
  Description of Artificial Sequence: Synthetic peptide
ASITYGGNINYA

SEQ ID NO: 1392 - protein, 13 aa, Artificial Sequence
  Description of Artificial Sequence: Synthetic peptide
ASVNWSGGTTSYA

SEQ ID NO: 1393 - protein, 13 aa, Artificial Sequence
  Description of Artificial Sequence: Synthetic peptide
AAISWSPGRTDYA

SEQ ID NO: 1394 - protein, 12 aa, Artificial Sequence
  Description of Artificial Sequence: Synthetic peptide
ASLATGGNTNYA

SEQ ID NO: 1395 - protein, 12 aa, Artificial Sequence
  Description of Artificial Sequence: Synthetic peptide
AAISRFGSTYYA

SEQ ID NO: 1396 - protein, 12 aa, Artificial Sequence
  Description of Artificial Sequence: Synthetic peptide
AAITSGGSTVYA

SEQ ID NO: 1397 - protein, 12 aa, Artificial Sequence
  Description of Artificial Sequence: Synthetic peptide
AAISTGSVTIYA

SEQ ID NO: 1398 - protein, 12 aa, Artificial Sequence
  Description of Artificial Sequence: Synthetic peptide
AHITAGGLSNYA

SEQ ID NO: 1399 - protein, 12 aa, Artificial Sequence
  Description of Artificial Sequence: Synthetic peptide
ARITSGGSTGYA

SEQ ID NO: 1400 - protein, 13 aa, Artificial Sequence
  Description of Artificial Sequence: Synthetic peptide
AGITWNGDTTYYA

SEQ ID NO: 1401 - protein, 12 aa, Artificial Sequence
  Description of Artificial Sequence: Synthetic peptide
AAVPLSGNTYYA

SEQ ID NO: 1402 - protein, 13 aa, Artificial Sequence
  Description of Artificial Sequence: Synthetic peptide
AAISGSENVTSYA

SEQ ID NO: 1403 - protein, 13 aa, Artificial Sequence
  Description of Artificial Sequence: Synthetic peptide
SSIYSDGSNTYYA

SEQ ID NO: 1404 - protein, 13 aa, Artificial Sequence
  Description of Artificial Sequence: Synthetic peptide
ATISQSGAATAYA

SEQ ID NO: 1405 - protein, 13 aa, Artificial Sequence
  Description of Artificial Sequence: Synthetic peptide
AAINWSGGSTNYA

SEQ ID NO: 1406 - protein, 13 aa, Artificial Sequence
  Description of Artificial Sequence: Synthetic peptide
AVISWTGGSTYYA

SEQ ID NO: 1407 - protein, 12 aa, Artificial Sequence
  Description of Artificial Sequence: Synthetic peptide
AAIGSGGSTSYA

SEQ ID NO: 1408 - protein, 13 aa, Artificial Sequence
  Description of Artificial Sequence: Synthetic peptide
AAINWSHGVTYYA

SEQ ID NO: 1409 - protein, 12 aa, Artificial Sequence
  Description of Artificial Sequence: Synthetic peptide
ASLSIFGATGYA

SEQ ID NO: 1410 - protein, 12 aa, Artificial Sequence
  Description of Artificial Sequence: Synthetic peptide
AAISSGGSTDYA

SEQ ID NO: 1411 - protein, 13 aa, Artificial Sequence
  Description of Artificial Sequence: Synthetic peptide
AAISSSGALTSYA

SEQ ID NO: 1412 - protein, 12 aa, Artificial Sequence
  Description of Artificial Sequence: Synthetic peptide
AHITAGGLSNYA

SEQ ID NO: 1413 - protein, 12 aa, Artificial Sequence
  Description of Artificial Sequence: Synthetic peptide
AGISRSGGTYYA

SEQ ID NO: 1414 - protein, 13 aa, Artificial Sequence
  Description of Artificial Sequence: Synthetic peptide
AAIGWGGGSTRYA

SEQ ID NO: 1415 - protein, 15 aa, Artificial Sequence
  Description of Artificial Sequence: Synthetic peptide
AIITSSDTNDTTNYA

SEQ ID NO: 1416 - protein, 13 aa, Artificial Sequence
  Description of Artificial Sequence: Synthetic peptide
AAIDWSGGSTAYA

SEQ ID NO: 1417 - protein, 12 aa, Artificial Sequence
  Description of Artificial Sequence: Synthetic peptide
AVITREGSTYYA

SEQ ID NO: 1418 - protein, 12 aa, Artificial Sequence
  Description of Artificial Sequence: Synthetic peptide
AAITSGGSTDYA

SEQ ID NO: 1419 - protein, 13 aa, Artificial Sequence
  Description of Artificial Sequence: Synthetic peptide
AAISRSGGNTYYA

SEQ ID NO: 1420 - protein, 12 aa, Artificial Sequence
  Description of Artificial Sequence: Synthetic peptide
AAINSGGSTYYA

SEQ ID NO: 1421 - protein, 12 aa, Artificial Sequence
  Description of Artificial Sequence: Synthetic peptide
AAVTEGGTTSYA

SEQ ID NO: 1422 - protein, 12 aa, Artificial Sequence
  Description of Artificial Sequence: Synthetic peptide
ASVTSGGYTHYA

SEQ ID NO: 1423 - protein, 13 aa, Artificial Sequence
  Description of Artificial Sequence: Synthetic peptide
SWISSSDGSTYYA

SEQ ID NO: 1424 - protein, 12 aa, Artificial Sequence
  Description of Artificial Sequence: Synthetic peptide
AFISGNGGTSYA

SEQ ID NO: 1425 - protein, 13 aa, Artificial Sequence
  Description of Artificial Sequence: Synthetic peptide
AAVTWSGGTTNYA

SEQ ID NO: 1426 - protein, 13 aa, Artificial Sequence
  Description of Artificial Sequence: Synthetic peptide
AAISWGGGSIYYA

SEQ ID NO: 1427 - protein, 13 aa, Artificial Sequence
  Description of Artificial Sequence: Synthetic peptide
AAITWSGAITSYA

SEQ ID NO: 1428 - protein, 13 aa, Artificial Sequence
  Description of Artificial Sequence: Synthetic peptide
AAINSGGSYTYYA

SEQ ID NO: 1429 - protein, 13 aa, Artificial Sequence
  Description of Artificial Sequence: Synthetic peptide
SAINWSGGSLLYA

SEQ ID NO: 1430 - protein, 12 aa, Artificial Sequence
  Description of Artificial Sequence: Synthetic peptide
AVITSNGRPSYA

SEQ ID NO: 1431 - protein, 12 aa, Artificial Sequence
  Description of Artificial Sequence: Synthetic peptide
AIIRGDGRTSYA

SEQ ID NO: 1432 - protein, 13 aa, Artificial Sequence
  Description of Artificial Sequence: Synthetic peptide
AVINWSGGSIYYA

SEQ ID NO: 1433 - protein, 13 aa, Artificial Sequence
  Description of Artificial Sequence: Synthetic peptide
AVVNWNGSSTVYA

SEQ ID NO: 1434 - protein, 11 aa, Artificial Sequence
  Description of Artificial Sequence: Synthetic peptide
AAVRWSSTYYA

SEQ ID NO: 1435 - protein, 13 aa, Artificial Sequence
  Description of Artificial Sequence: Synthetic peptide
ASISSSGVSKHYA

SEQ ID NO: 1436 - protein, 15 aa, Artificial Sequence
  Description of Artificial Sequence: Synthetic peptide
ATIWRRGNTYYANYA

SEQ ID NO: 1437 - protein, 12 aa, Artificial Sequence
  Description of Artificial Sequence: Synthetic peptide
AAISMSGLTSYA

SEQ ID NO: 1438 - protein, 13 aa, Artificial Sequence
  Description of Artificial Sequence: Synthetic peptide
AGIIRSGGETLYA

SEQ ID NO: 1439 - protein, 13 aa, Artificial Sequence
  Description of Artificial Sequence: Synthetic peptide
AVIRWTGGSTYYA

SEQ ID NO: 1440 - protein, 12 aa, Artificial Sequence
  Description of Artificial Sequence: Synthetic peptide
AIITSGGRTNYA

SEQ ID NO: 1441 - protein, 13 aa, Artificial Sequence
  Description of Artificial Sequence: Synthetic peptide
AAITWSGDITNYA

SEQ ID NO: 1442 - protein, 13 aa, Artificial Sequence
  Description of Artificial Sequence: Synthetic peptide
AAINWSSRSTVYA

SEQ ID NO: 1443 - protein, 13 aa, Artificial Sequence
  Description of Artificial Sequence: Synthetic peptide
AGISRSGASTAYA

SEQ ID NO: 1444 - protein, 12 aa, Artificial Sequence
  Description of Artificial Sequence: Synthetic peptide
AHITAGGLSNYA

SEQ ID NO: 1445 - protein, 16 aa, Artificial Sequence
  Description of Artificial Sequence: Synthetic peptide
AAISWTGDSTYYKYYA

SEQ ID NO: 1446 - protein, 12 aa, Artificial Sequence
  Description of Artificial Sequence: Synthetic peptide
SAIDSEGTTTYA

SEQ ID NO: 1447 - protein, 12 aa, Artificial Sequence
  Description of Artificial Sequence: Synthetic peptide
AVRWSDDYTYYA

SEQ ID NO: 1448 - protein, 12 aa, Artificial Sequence
  Description of Artificial Sequence: Synthetic peptide
ASITDGGSTYYA

SEQ ID NO: 1449 - protein, 13 aa, Artificial Sequence
  Description of Artificial Sequence: Synthetic peptide
AAISWDGGATAYA

SEQ ID NO: 1450 - protein, 13 aa, Artificial Sequence
  Description of Artificial Sequence: Synthetic peptide
AATSWSGGSKYYA

SEQ ID NO: 1451 - protein, 12 aa, Artificial Sequence
  Description of Artificial Sequence: Synthetic peptide
AVISSSSSTNYA

SEQ ID NO: 1452 - protein, 13 aa, Artificial Sequence
  Description of Artificial Sequence: Synthetic peptide
AAIRWSGGITYYA

SEQ ID NO: 1453 - protein, 12 aa, Artificial Sequence
  Description of Artificial Sequence: Synthetic peptide
ASIDWSGLTSYA

SEQ ID NO: 1454 - protein, 13 aa, Artificial Sequence
  Description of Artificial Sequence: Synthetic peptide
AGIWRSGGHRDYA

SEQ ID NO: 1455 - protein, 13 aa, Artificial Sequence
  Description of Artificial Sequence: Synthetic peptide
GGISRSGVSTSYA

SEQ ID NO: 1456 - protein, 12 aa, Artificial Sequence
  Description of Artificial Sequence: Synthetic peptide
TIIDNGGPTSYA

SEQ ID NO: 1457 - protein, 13 aa, Artificial Sequence
  Description of Artificial Sequence: Synthetic peptide
AAISRSGRSTSYA

SEQ ID NO: 1458 - protein, 13 aa, Artificial Sequence
  Description of Artificial Sequence: Synthetic peptide
ATINYSGGGTYYA

SEQ ID NO: 1459 - protein, 13 aa, Artificial Sequence
  Description of Artificial Sequence: Synthetic peptide
AAISRSGKSTYYA

SEQ ID NO: 1460 - protein, 13 aa, Artificial Sequence
  Description of Artificial Sequence: Synthetic peptide
ALITPSSRTTYYA

SEQ ID NO: 1461 - protein, 13 aa, Artificial Sequence
  Description of Artificial Sequence: Synthetic peptide
ASINWGGGNTYYA

SEQ ID NO: 1462 - protein, 13 aa, Artificial Sequence
  Description of Artificial Sequence: Synthetic peptide
AAIRWSGGRTVYA

SEQ ID NO: 1463 - protein, 13 aa, Artificial Sequence
  Description of Artificial Sequence: Synthetic peptide
AAISWRGGNTYYA

SEQ ID NO: 1464 - protein, 13 aa, Artificial Sequence
  Description of Artificial Sequence: Synthetic peptide
AAISRSGGSTYYA

SEQ ID NO: 1465 - protein, 13 aa, Artificial Sequence
  Description of Artificial Sequence: Synthetic peptide
ASISRSGGSTYYA

SEQ ID NO: 1466 - protein, 13 aa, Artificial Sequence
  Description of Artificial Sequence: Synthetic peptide
ALINRSGGSQFYA

SEQ ID NO: 1467 - protein, 12 aa, Artificial Sequence
  Description of Artificial Sequence: Synthetic peptide
AGISRGGGTNYA

SEQ ID NO: 1468 - protein, 13 aa, Artificial Sequence
  Description of Artificial Sequence: Synthetic peptide
SSIYSDDGDSMYA

SEQ ID NO: 1469 - protein, 16 aa, Artificial Sequence
  Description of Artificial Sequence: Synthetic peptide
SAISWIIGSGGTTNYA

SEQ ID NO: 1470 - protein, 12 aa, Artificial Sequence
  Description of Artificial Sequence: Synthetic peptide
ASITKFGSTNYA

SEQ ID NO: 1471 - protein, 12 aa, Artificial Sequence
  Description of Artificial Sequence: Synthetic peptide
ASISSFGSTKYA

SEQ ID NO: 1472 - protein, 12 aa, Artificial Sequence
  Description of Artificial Sequence: Synthetic peptide
AAITSGGRKNYA

SEQ ID NO: 1473 - protein, 12 aa, Artificial Sequence
  Description of Artificial Sequence: Synthetic peptide
PAISSTGLASYT

SEQ ID NO: 1474 - protein, 13 aa, Artificial Sequence
  Description of Artificial Sequence: Synthetic peptide
ARIGYSGQSISYA

SEQ ID NO: 1475 - protein, 12 aa, Artificial Sequence
  Description of Artificial Sequence: Synthetic peptide
AQINRHGVTYYA

SEQ ID NO: 1476 - protein, 13 aa, Artificial Sequence
  Description of Artificial Sequence: Synthetic peptide
AGITGSGRSQYYA

SEQ ID NO: 1477 - protein, 12 aa, Artificial Sequence
  Description of Artificial Sequence: Synthetic peptide
AGISRGGSTNYA

SEQ ID NO: 1478 - protein, 13 aa, Artificial Sequence
  Description of Artificial Sequence: Synthetic peptide
AGISWSGARTHYA

SEQ ID NO: 1479 - protein, 13 aa, Artificial Sequence
  Description of Artificial Sequence: Synthetic peptide
ATIRWSDGSTYYA

SEQ ID NO: 1480 - protein, 12 aa, Artificial Sequence
  Description of Artificial Sequence: Synthetic peptide
ASISSSGRTSYA

SEQ ID NO: 1481 - protein, 13 aa, Artificial Sequence
  Description of Artificial Sequence: Synthetic peptide
AAISWSGRNINYA

SEQ ID NO: 1482 - protein, 12 aa, Artificial Sequence
  Description of Artificial Sequence: Synthetic peptide
AAISWSGSTSYA

SEQ ID NO: 1483 - protein, 12 aa, Artificial Sequence
  Description of Artificial Sequence: Synthetic peptide
ATWTSRGITTYA

SEQ ID NO: 1484 - protein, 12 aa, Artificial Sequence
  Description of Artificial Sequence: Synthetic peptide
ARITRGGITKYA

SEQ ID NO: 1485 - protein, 11 aa, Artificial Sequence
  Description of Artificial Sequence: Synthetic peptide
ARISPGGTFYA

SEQ ID NO: 1486 - protein, 12 aa, Artificial Sequence
  Description of Artificial Sequence: Synthetic peptide
ASISRSGTTMYA

SEQ ID NO: 1487 - protein, 12 aa, Artificial Sequence
  Description of Artificial Sequence: Synthetic peptide
ATINSRGITNYA

SEQ ID NO: 1488 - protein, 12 aa, Artificial Sequence
  Description of Artificial Sequence: Synthetic peptide
ARISRFGRTNYA

SEQ ID NO: 1489 - protein, 13 aa, Artificial Sequence
  Description of Artificial Sequence: Synthetic peptide
GAIDWSGRRITYA

SEQ ID NO: 1490 - protein, 12 aa, Artificial Sequence
  Description of Artificial Sequence: Synthetic peptide
ASITKFGSTNYA

SEQ ID NO: 1491 - protein, 12 aa, Artificial Sequence
  Description of Artificial Sequence: Synthetic peptide
ASINRGGSTKYA

SEQ ID NO: 1492 - protein, 13 aa, Artificial Sequence
  Description of Artificial Sequence: Synthetic peptide
ATINWSGGYTVYA

SEQ ID NO: 1493 - protein, 12 aa, Artificial Sequence
  Description of Artificial Sequence: Synthetic peptide
AGIITNGSTNYA

SEQ ID NO: 1494 - protein, 12 aa, Artificial Sequence
  Description of Artificial Sequence: Synthetic peptide
ASITPGGNTNYA

SEQ ID NO: 1495 - protein, 13 aa, Artificial Sequence
  Description of Artificial Sequence: Synthetic peptide
ARIWWRSGATYYA

SEQ ID NO: 1496 - protein, 13 aa, Artificial Sequence
  Description of Artificial Sequence: Synthetic peptide
AEISSSGGYTYYA

SEQ ID NO: 1497 - protein, 12 aa, Artificial Sequence
  Description of Artificial Sequence: Synthetic peptide
ALIFSGGSTYYA

SEQ ID NO: 1498 - protein, 12 aa, Artificial Sequence
  Description of Artificial Sequence: Synthetic peptide
ATISIGGRTYYA

SEQ ID NO: 1499 - protein, 12 aa, Artificial Sequence
  Description of Artificial Sequence: Synthetic peptide
ASINRGGSTNYA

SEQ ID NO: 1500 - protein, 13 aa, Artificial Sequence
  Description of Artificial Sequence: Synthetic peptide
AAISWSGGSTSYA

SEQ ID NO: 1501 - protein, 11 aa, Artificial Sequence
  Description of Artificial Sequence: Synthetic peptide
ASMRGSRSYYA

SEQ ID NO: 1502 - protein, 12 aa, Artificial Sequence
  Description of Artificial Sequence: Synthetic peptide
ASISSFGSTYYA

SEQ ID NO: 1503 - protein, 12 aa, Artificial Sequence
  Description of Artificial Sequence: Synthetic peptide
ASITSGGSTNYA

SEQ ID NO: 1504 - protein, 13 aa, Artificial Sequence
  Description of Artificial Sequence: Synthetic peptide
AGISRFFGTAYYA

SEQ ID NO: 1505 - protein, 12 aa, Artificial Sequence
  Description of Artificial Sequence: Synthetic peptide
ASISRFGRTNYA

SEQ ID NO: 1506 - protein, 12 aa, Artificial Sequence
  Description of Artificial Sequence: Synthetic peptide
ASISRFGRTNYA

SEQ ID NO: 1507 - protein, 13 aa, Artificial Sequence
  Description of Artificial Sequence: Synthetic peptide
ARIWRSGGNTYYA

SEQ ID NO: 1508 - protein, 12 aa, Artificial Sequence
  Description of Artificial Sequence: Synthetic peptide
ALISRVGVTSYA

SEQ ID NO: 1509 - protein, 13 aa, Artificial Sequence
  Description of Artificial Sequence: Synthetic peptide
ATISRSGGNTYYA

SEQ ID NO: 1510 - protein, 12 aa, Artificial Sequence
  Description of Artificial Sequence: Synthetic peptide
AAITSGGRTNYA

SEQ ID NO: 1511 - protein, 13 aa, Artificial Sequence
  Description of Artificial Sequence: Synthetic peptide
AVISWSGGSTKYA

SEQ ID NO: 1512 - protein, 13 aa, Artificial Sequence
  Description of Artificial Sequence: Synthetic peptide
ASISWGGARTYYA

SEQ ID NO: 1513 - protein, 13 aa, Artificial Sequence
  Description of Artificial Sequence: Synthetic peptide
AAITWNSGRTRYA

SEQ ID NO: 1514 - protein, 12 aa, Artificial Sequence
  Description of Artificial Sequence: Synthetic peptide
AAITNGGSTKYA

SEQ ID NO: 1515 - protein, 12 aa, Artificial Sequence
  Description of Artificial Sequence: Synthetic peptide
AAINRSGSTEYA

SEQ ID NO: 1516 - protein, 12 aa, Artificial Sequence
  Description of Artificial Sequence: Synthetic peptide
ASISRSGTTYYA

SEQ ID NO: 1517 - protein, 12 aa, Artificial Sequence
  Description of Artificial Sequence: Synthetic peptide
ASISRFGRTNYA

SEQ ID NO: 1518 - protein, 12 aa, Artificial Sequence
  Description of Artificial Sequence: Synthetic peptide
ARIWPGGSTYYA

SEQ ID NO: 1519 - protein, 14 aa, Artificial Sequence
  Description of Artificial Sequence: Synthetic peptide
AGINWRSGGSTYYA

SEQ ID NO: 1520 - protein, 12 aa, Artificial Sequence
  Description of Artificial Sequence: Synthetic peptide
ASISSGGTTAYA

SEQ ID NO: 1521 - protein, 12 aa, Artificial Sequence
  Description of Artificial Sequence: Synthetic peptide
AGINMISSTKYA

SEQ ID NO: 1522 - protein, 11 aa, Artificial Sequence
  Description of Artificial Sequence: Synthetic peptide
ARIAGGSTYYA

SEQ ID NO: 1523 - protein, 12 aa, Artificial Sequence
  Description of Artificial Sequence: Synthetic peptide
AAITSSGSTNYA

SEQ ID NO: 1524 - protein, 12 aa, Artificial Sequence
  Description of Artificial Sequence: Synthetic peptide
ASITKFGSTNYA

SEQ ID NO: 1525 - protein, 12 aa, Artificial Sequence
  Description of Artificial Sequence: Synthetic peptide
ASISRFGRTNYA

SEQ ID NO: 1526 - protein, 12 aa, Artificial Sequence
  Description of Artificial Sequence: Synthetic peptide
ARISSGGSTSYA

SEQ ID NO: 1527 - protein, 12 aa, Artificial Sequence
  Description of Artificial Sequence: Synthetic peptide
AAITSGGRTSYA

SEQ ID NO: 1528 - protein, 12 aa, Artificial Sequence
  Description of Artificial Sequence: Synthetic peptide
AQITRGGSTNYA

SEQ ID NO: 1529 - protein, 13 aa, Artificial Sequence
  Description of Artificial Sequence: Synthetic peptide
AVISYDGNHEYYA

SEQ ID NO: 1530 - protein, 13 aa, Artificial Sequence
  Description of Artificial Sequence: Synthetic peptide
AVISFDGSNEYYA

SEQ ID NO: 1531 - protein, 13 aa, Artificial Sequence
  Description of Artificial Sequence: Synthetic peptide
AVVSTEGGTTYYA

SEQ ID NO: 1532 - protein, 13 aa, Artificial Sequence
  Description of Artificial Sequence: Synthetic peptide
AVISYDGSNKYYA

SEQ ID NO: 1533 - protein, 13 aa, Artificial Sequence
  Description of Artificial Sequence: Synthetic peptide
AVVSTEGGTTYYA

SEQ ID NO: 1534 - protein, 13 aa, Artificial Sequence
  Description of Artificial Sequence: Synthetic peptide
AVISYDGSNEYYA

SEQ ID NO: 1535 - protein, 13 aa, Artificial Sequence
  Description of Artificial Sequence: Synthetic peptide
AVISYDGNHEYYA

SEQ ID NO: 1536 - protein, 13 aa, Artificial Sequence
  Description of Artificial Sequence: Synthetic peptide
AVISYDGNHEYYA

SEQ ID NO: 1537 - protein, 13 aa, Artificial Sequence
  Description of Artificial Sequence: Synthetic peptide
AVISYDGSSKYYA

SEQ ID NO: 1538 - protein, 13 aa, Artificial Sequence
  Description of Artificial Sequence: Synthetic peptide
AVVSYDGTTKYYA

SEQ ID NO: 1539 - protein, 13 aa, Artificial Sequence
  Description of Artificial Sequence: Synthetic peptide
AVISYDGSLKYYA

SEQ ID NO: 1540 - protein, 13 aa, Artificial Sequence
  Description of Artificial Sequence: Synthetic peptide
AVISYDGSNKYYA

SEQ ID NO: 1541 - protein, 13 aa, Artificial Sequence
  Description of Artificial Sequence: Synthetic peptide
AVISYDGNNKYYA

SEQ ID NO: 1542 - protein, 13 aa, Artificial Sequence
  Description of Artificial Sequence: Synthetic peptide
AVISYEGSIKYYA

SEQ ID NO: 1543 - skipped

SEQ ID NO: 1544 - protein, 13 aa, Artificial Sequence
  Description of Artificial Sequence: Synthetic peptide
AVISYDGTNEYYA

SEQ ID NO: 1545 - protein, 13 aa, Artificial Sequence
  Description of Artificial Sequence: Synthetic peptide
AVISYDGTNEYYA

SEQ ID NO: 1546 - protein, 13 aa, Artificial Sequence
  Description of Artificial Sequence: Synthetic peptide
AVISYDGTNEYYA

SEQ ID NO: 1547 - protein, 13 aa, Artificial Sequence
  Description of Artificial Sequence: Synthetic peptide
AVISYDGTNEYYA

SEQ ID NO: 1548 - protein, 13 aa, Artificial Sequence
  Description of Artificial Sequence: Synthetic peptide
AVISYDGTNEYYA

SEQ ID NO: 1549 - protein, 13 aa, Artificial Sequence
  Description of Artificial Sequence: Synthetic peptide
AVISYDGTNEYYA

SEQ ID NO: 1550 - protein, 13 aa, Artificial Sequence
  Description of Artificial Sequence: Synthetic peptide
AVISYDGGDEYYA

SEQ ID NO: 1551 - protein, 13 aa, Artificial Sequence
  Description of Artificial Sequence: Synthetic peptide
AVVSTEGGTTYYA

SEQ ID NO: 1552 - protein, 13 aa, Artificial Sequence
  Description of Artificial Sequence: Synthetic peptide
AVISYDGNHEYYA

SEQ ID NO: 1553 - protein, 13 aa, Artificial Sequence
  Description of Artificial Sequence: Synthetic peptide
AVISDDGRNKYYA

SEQ ID NO: 1554 - protein, 13 aa, Artificial Sequence
  Description of Artificial Sequence: Synthetic peptide
AVISYDGSNKYYA

SEQ ID NO: 1555 - protein, 13 aa, Artificial Sequence
  Description of Artificial Sequence: Synthetic peptide
AVVSTEGGTTYYA

SEQ ID NO: 1556 - protein, 13 aa, Artificial Sequence
  Description of Artificial Sequence: Synthetic peptide
AVISYDGSNQYYA

SEQ ID NO: 1557 - protein, 13 aa, Artificial Sequence
  Description of Artificial Sequence: Synthetic peptide
AVISYDGSNTYYA

SEQ ID NO: 1558 - protein, 13 aa, Artificial Sequence
  Description of Artificial Sequence: Synthetic peptide
AVVSTEGGTTYYA

SEQ ID NO: 1559 - protein, 13 aa, Artificial Sequence
  Description of Artificial Sequence: Synthetic peptide
AVISYDGSNIYYA

SEQ ID NO: 1560 - protein, 13 aa, Artificial Sequence
  Description of Artificial Sequence: Synthetic peptide
AVISYDGSNKYYA

SEQ ID NO: 1561 - protein, 13 aa, Artificial Sequence
  Description of Artificial Sequence: Synthetic peptide
AVISYDGSNKYYA

SEQ ID NO: 1562 - protein, 13 aa, Artificial Sequence
  Description of Artificial Sequence: Synthetic peptide
AVISYDGSDKYYA

SEQ ID NO: 1563 - protein, 13 aa, Artificial Sequence
  Description of Artificial Sequence: Synthetic peptide
AVISYDGSHKYYA

SEQ ID NO: 1564 - protein, 13 aa, Artificial Sequence
  Description of Artificial Sequence: Synthetic peptide
AVISYDGSDKYYA

SEQ ID NO: 1565 - protein, 13 aa, Artificial Sequence
  Description of Artificial Sequence: Synthetic peptide
AVISYDGSNEYYA

SEQ ID NO: 1566 - protein, 13 aa, Artificial Sequence
  Description of Artificial Sequence: Synthetic peptide
AVISYDGSNKYYA

SEQ ID NO: 1567 - protein, 13 aa, Artificial Sequence
  Description of Artificial Sequence: Synthetic peptide
AVISYDGNNKYYA

SEQ ID NO: 1568 - protein, 13 aa, Artificial Sequence
  Description of Artificial Sequence: Synthetic peptide
AVISYDGTNDYYA

SEQ ID NO: 1569 - protein, 13 aa, Artificial Sequence
  Description of Artificial Sequence: Synthetic peptide
AVISYDGSNKYYA

SEQ ID NO: 1570 - protein, 13 aa, Artificial Sequence
  Description of Artificial Sequence: Synthetic peptide
AVTSYDGSNKYYA

SEQ ID NO: 1571 - protein, 13 aa, Artificial Sequence
  Description of Artificial Sequence: Synthetic peptide
AVISYDGSSKYYA

SEQ ID NO: 1572 - protein, 13 aa, Artificial Sequence
  Description of Artificial Sequence: Synthetic peptide
AVISYDGSNQYYA

SEQ ID NO: 1573 - protein, 13 aa, Artificial Sequence
  Description of Artificial Sequence: Synthetic peptide
AVISYDGTNDYYA

SEQ ID NO: 1574 - protein, 13 aa, Artificial Sequence
  Description of Artificial Sequence: Synthetic peptide
AVTSYDGSNKYYS

SEQ ID NO: 1575 - protein, 13 aa, Artificial Sequence
  Description of Artificial Sequence: Synthetic peptide
AVISYDGSNKYYA

SEQ ID NO: 1576 - protein, 13 aa, Artificial Sequence
  Description of Artificial Sequence: Synthetic peptide
AVISYDGTNEYYA

SEQ ID NO: 1577 - protein, 13 aa, Artificial Sequence
  Description of Artificial Sequence: Synthetic peptide
AVISYDGTNDYYA

SEQ ID NO: 1578 - protein, 13 aa, Artificial Sequence
  Description of Artificial Sequence: Synthetic peptide
AVISYDGTTEYYA

SEQ ID NO: 1579 - protein, 13 aa, Artificial Sequence
  Description of Artificial Sequence: Synthetic peptide
AVISYDGSIKYYA

SEQ ID NO: 1580 - protein, 13 aa, Artificial Sequence
  Description of Artificial Sequence: Synthetic peptide
AVISYDGSNEYYA

SEQ ID NO: 1581 - protein, 13 aa, Artificial Sequence
  Description of Artificial Sequence: Synthetic peptide
AVISYDGSNKYYA

SEQ ID NO: 1582 - protein, 13 aa, Artificial Sequence
  Description of Artificial Sequence: Synthetic peptide
AVISYDGSNKYYA

SEQ ID NO: 1583 - protein, 13 aa, Artificial Sequence
  Description of Artificial Sequence: Synthetic peptide
AVISYDGSNKYYA

SEQ ID NO: 1584 - protein, 13 aa, Artificial Sequence
  Description of Artificial Sequence: Synthetic peptide
AVISYDGSNKYYA

SEQ ID NO: 1585 - protein, 13 aa, Artificial Sequence
  Description of Artificial Sequence: Synthetic peptide
AVISYDGSSKYYA

SEQ ID NO: 1586 - protein, 13 aa, Artificial Sequence
  Description of Artificial Sequence: Synthetic peptide
AVISYDGNHEYYA

SEQ ID NO: 1587 - protein, 13 aa, Artificial Sequence
  Description of Artificial Sequence: Synthetic peptide
AVISYDGSNQYYA

SEQ ID NO: 1588 - protein, 13 aa, Artificial Sequence
  Description of Artificial Sequence: Synthetic peptide
AVISYDGTYEYYA

SEQ ID NO: 1589 - protein, 13 aa, Artificial Sequence
  Description of Artificial Sequence: Synthetic peptide
AVISYDGSNKYYA

SEQ ID NO: 1590 - protein, 13 aa, Artificial Sequence
  Description of Artificial Sequence: Synthetic peptide
AVISYDGSNKYYA

SEQ ID NO: 1591 - protein, 13 aa, Artificial Sequence
  Description of Artificial Sequence: Synthetic peptide
AVISYDGNHEYYA

SEQ ID NO: 1592 - protein, 13 aa, Artificial Sequence
  Description of Artificial Sequence: Synthetic peptide
AVISYDGSNKYYA

SEQ ID NO: 1593 - protein, 13 aa, Artificial Sequence
  Description of Artificial Sequence: Synthetic peptide
AVISYDGNNKYYA

SEQ ID NO: 1594 - protein, 13 aa, Artificial Sequence
  Description of Artificial Sequence: Synthetic peptide
AVISYDGSNQYYA

SEQ ID NO: 1595 - protein, 13 aa, Artificial Sequence
  Description of Artificial Sequence: Synthetic peptide
AVISYDGSNEYYA

SEQ ID NO: 1596 - protein, 13 aa, Artificial Sequence
  Description of Artificial Sequence: Synthetic peptide
AVISYDGSTKYYA

SEQ ID NO: 1597 - protein, 13 aa, Artificial Sequence
  Description of Artificial Sequence: Synthetic peptide
AVISYDGTNEYYA

SEQ ID NO: 1598 - protein, 13 aa, Artificial Sequence
  Description of Artificial Sequence: Synthetic peptide
AVISYDGNNKYYA

SEQ ID NO: 1599 - protein, 13 aa, Artificial Sequence
  Description of Artificial Sequence: Synthetic peptide
AVISYDGSNKYYA

SEQ ID NO: 1600 - skipped

SEQ ID NO: 1601 - protein, 13 aa, Artificial Sequence
  Description of Artificial Sequence: Synthetic peptide
AVISYDGNNKYYA

SEQ ID NO: 1602 - protein, 13 aa, Artificial Sequence
  Description of Artificial Sequence: Synthetic peptide
AVISYDGSNQYYA

SEQ ID NO: 1603 - protein, 13 aa, Artificial Sequence
  Description of Artificial Sequence: Synthetic peptide
AVISYDGSSKYYA

SEQ ID NO: 1604 - protein, 13 aa, Artificial Sequence
  Description of Artificial Sequence: Synthetic peptide
AVISYDGSNKYYA

SEQ ID NO: 1605 - protein, 13 aa, Artificial Sequence
  Description of Artificial Sequence: Synthetic peptide
AVISYDGSNDYYA

SEQ ID NO: 1606 - protein, 13 aa, Artificial Sequence
  Description of Artificial Sequence: Synthetic peptide
AVISYDGSNQYYA

SEQ ID NO: 1607 - protein, 13 aa, Artificial Sequence
  Description of Artificial Sequence: Synthetic peptide
AVISYDGSNQYYA

SEQ ID NO: 1608 - protein, 13 aa, Artificial Sequence
  Description of Artificial Sequence: Synthetic peptide
AVISYDGNHEYYA

SEQ ID NO: 1609 - protein, 13 aa, Artificial Sequence
  Description of Artificial Sequence: Synthetic peptide
AVISYDGSNTYYA

SEQ ID NO: 1610 - protein, 13 aa, Artificial Sequence
  Description of Artificial Sequence: Synthetic peptide
AVISYDGSNKYYA

SEQ ID NO: 1611 - protein, 13 aa, Artificial Sequence
  Description of Artificial Sequence: Synthetic peptide
AVISYDGSHKYYA

SEQ ID NO: 1612 - protein, 13 aa, Artificial Sequence
  Description of Artificial Sequence: Synthetic peptide
AVISYDGSNEYYA

SEQ ID NO: 1613 - protein, 13 aa, Artificial Sequence
  Description of Artificial Sequence: Synthetic peptide
AVISYDGRNQYYA

SEQ ID NO: 1614 - protein, 13 aa, Artificial Sequence
  Description of Artificial Sequence: Synthetic peptide
AVISYDGNNKYYA

SEQ ID NO: 1615 - protein, 13 aa, Artificial Sequence
  Description of Artificial Sequence: Synthetic peptide
AVISYDGSDKYYA

SEQ ID NO: 1616 - protein, 13 aa, Artificial Sequence
  Description of Artificial Sequence: Synthetic peptide
AVISYDGSNKYYA

SEQ ID NO: 1617 - protein, 13 aa, Artificial Sequence
  Description of Artificial Sequence: Synthetic peptide
AVISYDGSSKYYA

SEQ ID NO: 1618 - protein, 18 aa, Artificial Sequence
  Description of Artificial Sequence: Synthetic peptide
CAKGDSGSYYGSSYFDYW

SEQ ID NO: 1619 - protein, 25 aa, Artificial Sequence
  Description of Artificial Sequence: Synthetic peptide
CTRVRRGSGVAPYSSSWGRYYFDYW

SEQ ID NO: 1620 - protein, 22 aa, Artificial Sequence
  Description of Artificial Sequence: Synthetic peptide
CAKDGSGTIFGVVIAKYYFDYW

SEQ ID NO: 1621 - protein, 19 aa, Artificial Sequence
  Description of Artificial Sequence: Synthetic peptide
CASWGPLWSGSPNDAFDIW

SEQ ID NO: 1622 - protein, 22 aa, Artificial Sequence
  Description of Artificial Sequence: Synthetic peptide
CARVRSYDSTAYDEPLDALDIW

SEQ ID NO: 1623 - protein, 19 aa, Artificial Sequence
  Description of Artificial Sequence: Synthetic peptide
CGRDARSSGYNGYDLFDIW

SEQ ID NO: 1624 - protein, 14 aa, Artificial Sequence
  Description of Artificial Sequence: Synthetic peptide
CAKGPLVGWYFDLW

SEQ ID NO: 1625 - protein, 19 aa, Artificial Sequence
  Description of Artificial Sequence: Synthetic peptide
CASWGPLWSGSPNDAFDIW

SEQ ID NO: 1626 - protein, 18 aa, Artificial Sequence
  Description of Artificial Sequence: Synthetic peptide
CTRQGDSSGWYDGWFDPW

SEQ ID NO: 1627 - protein, 12 aa, Artificial Sequence
  Description of Artificial Sequence: Synthetic peptide
CIATVVSPLDYW

SEQ ID NO: 1628 - protein, 16 aa, Artificial Sequence
  Description of Artificial Sequence: Synthetic peptide
CARDESSSSLNWFDPW

SEQ ID NO: 1629 - protein, 16 aa, Artificial Sequence
  Description of Artificial Sequence: Synthetic peptide
CASPDPLGSVADLDYW

SEQ ID NO: 1630 - protein, 14 aa, Artificial Sequence
  Description of Artificial Sequence: Synthetic peptide
CARVWSSSSVFDYW

SEQ ID NO: 1631 - protein, 17 aa, Artificial Sequence
  Description of Artificial Sequence: Synthetic peptide
CAKDRGGGSYYGTFDYW

SEQ ID NO: 1632 - protein, 20 aa, Artificial Sequence
  Description of Artificial Sequence: Synthetic peptide
CTRVRVAGYSSSWYDAFDIW

SEQ ID NO: 1633 - protein, 19 aa, Artificial Sequence
  Description of Artificial Sequence: Synthetic peptide
CVKGTIPIFGVIRSAFDYW

SEQ ID NO: 1634 - protein, 14 aa, Artificial Sequence
  Description of Artificial Sequence: Synthetic peptide
CARGSGSYSFFDYW

SEQ ID NO: 1635 - protein, 20 aa, Artificial Sequence
  Description of Artificial Sequence: Synthetic peptide
CATTPGPWIQLWFGGGFDYW

SEQ ID NO: 1636 - protein, 15 aa, Artificial Sequence
  Description of Artificial Sequence: Synthetic peptide
CAKDGLVVAGTFDYW

SEQ ID NO: 1637 - protein, 16 aa, Artificial Sequence
  Description of Artificial Sequence: Synthetic peptide
CARGALLEWLSRFDNW

SEQ ID NO: 1638 - protein, 14 aa, Artificial Sequence
  Description of Artificial Sequence: Synthetic peptide
CARDLGAADLIDYW

SEQ ID NO: 1639 - protein, 19 aa, Artificial Sequence
  Description of Artificial Sequence: Synthetic peptide
CVRVPAAAGKGVPGIFDIW

SEQ ID NO: 1640 - protein, 18 aa, Artificial Sequence
  Description of Artificial Sequence: Synthetic peptide
CARVRQGLRRTWYYFDYW

SEQ ID NO: 1641 - protein, 13 aa, Artificial Sequence
  Description of Artificial Sequence: Synthetic peptide
CAKEYSSSWFDPW

SEQ ID NO: 1642 - protein, 19 aa, Artificial Sequence
  Description of Artificial Sequence: Synthetic peptide
CAKREDYDFWSGRGAFDIW

SEQ ID NO: 1643 - protein, 16 aa, Artificial Sequence
  Description of Artificial Sequence: Synthetic peptide
CAKDIGYSSSWSFDYW

SEQ ID NO: 1644 - protein, 15 aa, Artificial Sequence
  Description of Artificial Sequence: Synthetic peptide
CARDDYSDYRPFDYW

SEQ ID NO: 1645 - protein, 17 aa, Artificial Sequence
  Description of Artificial Sequence: Synthetic peptide
CAHRPSLQWLDWWFDPW

SEQ ID NO: 1646 - protein, 17 aa, Artificial Sequence
  Description of Artificial Sequence: Synthetic peptide
CAKDGASGWPNWHFDLW

SEQ ID NO: 1647 - protein, 13 aa, Artificial Sequence
  Description of Artificial Sequence: Synthetic peptide
CAKGAAAGPFDYW

SEQ ID NO: 1648 - protein, 19 aa, Artificial Sequence
  Description of Artificial Sequence: Synthetic peptide
CAKEEYYYDSSGPNWFDPW

SEQ ID NO: 1649 - protein, 17 aa, Artificial Sequence
  Description of Artificial Sequence: Synthetic peptide
WAPQGGTTVPTGRFDPW

SEQ ID NO: 1650 - protein, 17 aa, Artificial Sequence
  Description of Artificial Sequence: Synthetic peptide
CSRGGGPAAGFHGLDVW

SEQ ID NO: 1651 - protein, 19 aa, Artificial Sequence
  Description of Artificial Sequence: Synthetic peptide
CARAAKRQQLFPRNYFDYW

SEQ ID NO: 1652 - protein, 14 aa, Artificial Sequence
  Description of Artificial Sequence: Synthetic peptide
CALHYGSGRSFDYW

SEQ ID NO: 1653 - protein, 19 aa, Artificial Sequence
  Description of Artificial Sequence: Synthetic peptide
CARPGGRIVGALWGAFDYW

SEQ ID NO: 1654 - protein, 18 aa, Artificial Sequence
  Description of Artificial Sequence: Synthetic peptide
CAKNWGDAGTTWFEKSGW

SEQ ID NO: 1655 - protein, 9 aa, Artificial Sequence
  Description of Artificial Sequence: Synthetic peptide
CAIDPDGEW

SEQ ID NO: 1656 - protein, 13 aa, Artificial Sequence
  Description of Artificial Sequence: Synthetic peptide
CAADVRDSIWRSW

SEQ ID NO: 1657 - protein, 18 aa, Artificial Sequence
  Description of Artificial Sequence: Synthetic peptide
CARLSCHDYSCYSAFDFW

SEQ ID NO: 1658 - protein, 17 aa, Artificial Sequence
  Description of Artificial Sequence: Synthetic peptide
CAAAGSMGWNHLRDYDW

SEQ ID NO: 1659 - protein, 18 aa, Artificial Sequence
  Description of Artificial Sequence: Synthetic peptide
CAARSGWGAAMRSADFRW

SEQ ID NO: 1660 - protein, 19 aa, Artificial Sequence
  Description of Artificial Sequence: Synthetic peptide
CARSPRFSGVVVRPGLDLW

SEQ ID NO: 1661 - protein, 16 aa, Artificial Sequence
  Description of Artificial Sequence: Synthetic peptide
CAACSDYYCSGVGAVW

SEQ ID NO: 1662 - protein, 23 aa, Artificial Sequence
  Description of Artificial Sequence: Synthetic peptide
CAKDSWDSSGYSYHYYYYGMDVW

SEQ ID NO: 1663 - protein, 15 aa, Artificial Sequence
  Description of Artificial Sequence: Synthetic peptide
CARGDIAVIQVLDYW

SEQ ID NO: 1664 - protein, 10 aa, Artificial Sequence
  Description of Artificial Sequence: Synthetic peptide
CAYSGIGTDW

SEQ ID NO: 1665 - protein, 10 aa, Artificial Sequence
  Description of Artificial Sequence: Synthetic peptide
CAAGWGDSAW

SEQ ID NO: 1666 - protein, 12 aa, Artificial Sequence
  Description of Artificial Sequence: Synthetic peptide
CAAFDGYTGSDW

SEQ ID NO: 1667 - protein, 20 aa, Artificial Sequence
  Description of Artificial Sequence: Synthetic peptide
CAADLTDIWEGIREYDEYAW

SEQ ID NO: 1668 - protein, 12 aa, Artificial Sequence
  Description of Artificial Sequence: Synthetic peptide
CAAGLRGRQYSW

SEQ ID NO: 1669 - protein, 12 aa, Artificial Sequence
  Description of Artificial Sequence: Synthetic peptide
CAAFDGYSGSDW

SEQ ID NO: 1670 - protein, 16 aa, Artificial Sequence
  Description of Artificial Sequence: Synthetic peptide
CATGPYRSYFARSYLW

SEQ ID NO: 1671 - protein, 19 aa, Artificial Sequence
  Description of Artificial Sequence: Synthetic peptide
CAATQWGSSGWKQARWYDW

SEQ ID NO: 1672 - protein, 20 aa, Artificial Sequence
  Description of Artificial Sequence: Synthetic peptide
CAKDPIAAADPGDSVSFDYW

SEQ ID NO: 1673 - protein, 12 aa, Artificial Sequence
  Description of Artificial Sequence: Synthetic peptide
CALNVWRTSSDW

SEQ ID NO: 1674 - protein, 13 aa, Artificial Sequence
  Description of Artificial Sequence: Synthetic peptide
CAAVTTQTYGYDW

SEQ ID NO: 1675 - protein, 16 aa, Artificial Sequence
  Description of Artificial Sequence: Synthetic peptide
CARHSDYSGLSNFDYW

SEQ ID NO: 1676 - protein, 17 aa, Artificial Sequence
  Description of Artificial Sequence: Synthetic peptide
CAKAKATVGLRAPFDYW

SEQ ID NO: 1677 - protein, 13 aa, Artificial Sequence
  Description of Artificial Sequence: Synthetic peptide
CALRVRPYGQYDW

SEQ ID NO: 1678 - protein, 20 aa, Artificial Sequence
  Description of Artificial Sequence: Synthetic peptide
CAVSKPLNYYTYYDARRYDW

SEQ ID NO: 1679 - protein, 20 aa, Artificial Sequence
  Description of Artificial Sequence: Synthetic peptide
CAVSQPLNYYTYYDARRYDW

SEQ ID NO: 1680 - protein, 20 aa, Artificial Sequence
  Description of Artificial Sequence: Synthetic peptide
CAASQAPITIATMMKPFYDW

SEQ ID NO: 1681 - protein, 13 aa, Artificial Sequence
  Description of Artificial Sequence: Synthetic peptide
CAVDLSGDAVYDW

SEQ ID NO: 1682 - protein, 13 aa, Artificial Sequence
  Description of Artificial Sequence: Synthetic peptide
CALPVGPYGQYDW

SEQ ID NO: 1683 - protein, 13 aa, Artificial Sequence
  Description of Artificial Sequence: Synthetic peptide
CALRVRPYGQYDW

SEQ ID NO: 1684 - protein, 18 aa, Artificial Sequence
  Description of Artificial Sequence: Synthetic peptide
CAADGVPEYSDYASGPVW

SEQ ID NO: 1685 - protein, 19 aa, Artificial Sequence
  Description of Artificial Sequence: Synthetic peptide
CARHTGRYSSGSTGWFHYW

SEQ ID NO: 1686 - protein, 13 aa, Artificial Sequence
  Description of Artificial Sequence: Synthetic peptide
CARTTFDNWFDPW

SEQ ID NO: 1687 - protein, 18 aa, Artificial Sequence
  Description of Artificial Sequence: Synthetic peptide
CAADGVPEYSDYASGPVW

SEQ ID NO: 1688 - protein, 13 aa, Artificial Sequence
  Description of Artificial Sequence: Synthetic peptide
ARREYIESGFDSW

SEQ ID NO: 1689 - protein, 19 aa, Artificial Sequence
  Description of Artificial Sequence: Synthetic peptide
CAATRGRSTRLVLPSLVEW

SEQ ID NO: 1690 - protein, 21 aa, Artificial Sequence
  Description of Artificial Sequence: Synthetic peptide
CAAALSEVWRGSENLREGYDW

SEQ ID NO: 1691 - protein, 13 aa, Artificial Sequence
  Description of Artificial Sequence: Synthetic peptide
CAARSVYSYEYNW

SEQ ID NO: 1692 - protein, 18 aa, Artificial Sequence
  Description of Artificial Sequence: Synthetic peptide
CAADGVPEYSDYASGPVW

SEQ ID NO: 1693 - protein, 12 aa, Artificial Sequence
  Description of Artificial Sequence: Synthetic peptide
CAKEDVGKPFDW

SEQ ID NO: 1694 - protein, 9 aa, Artificial Sequence
  Description of Artificial Sequence: Synthetic peptide
CAVDGPFGW

SEQ ID NO: 1695 - protein, 18 aa, Artificial Sequence
  Description of Artificial Sequence: Synthetic peptide
CAADRAADFFAQRDEYDW

SEQ ID NO: 1696 - protein, 10 aa, Artificial Sequence
  Description of Artificial Sequence: Synthetic peptide
CAARRWGYDW

SEQ ID NO: 1697 - protein, 9 aa, Artificial Sequence
  Description of Artificial Sequence: Synthetic peptide
CAKIGTLWW

SEQ ID NO: 1698 - protein, 18 aa, Artificial Sequence
  Description of Artificial Sequence: Synthetic peptide
CAADGVPEYSDYASGPVW

SEQ ID NO: 1699 - protein, 14 aa, Artificial Sequence
  Description of Artificial Sequence: Synthetic peptide
CAPTFAAGASEYHW

SEQ ID NO: 1700 - protein, 14 aa, Artificial Sequence
  Description of Artificial Sequence: Synthetic peptide
CARGAYGSGTYDYW

SEQ ID NO: 1701 - protein, 13 aa, Artificial Sequence
  Description of Artificial Sequence: Synthetic peptide
CASAYNPGIGYDW

SEQ ID NO: 1702 - protein, 12 aa, Artificial Sequence
  Description of Artificial Sequence: Synthetic peptide
CAKEDVGKPFDW

SEQ ID NO: 1703 - protein, 12 aa, Artificial Sequence
  Description of Artificial Sequence: Synthetic peptide
CAKEDVGKPFDW

SEQ ID NO: 1704 - protein, 12 aa, Artificial Sequence
  Description of Artificial Sequence: Synthetic peptide
CALRRRFGGQEW

SEQ ID NO: 1705 - protein, 12 aa, Artificial Sequence
  Description of Artificial Sequence: Synthetic peptide
CAKEDVGKPFDW

SEQ ID NO: 1706 - protein, 12 aa, Artificial Sequence
  Description of Artificial Sequence: Synthetic peptide
CAKQDVGKPFDW

SEQ ID NO: 1707 - protein, 10 aa, Artificial Sequence
  Description of Artificial Sequence: Synthetic peptide
CAARILSRNW

SEQ ID NO: 1708 - protein, 30 aa, Artificial Sequence
  Description of Artificial Sequence: Synthetic polypeptide
CAREVGLYYYGSGSSSRRLLGRIDYYFDYW

SEQ ID NO: 1709 - protein, 12 aa, Artificial Sequence
  Description of Artificial Sequence: Synthetic peptide
CAAFDGYTGSDW

SEQ ID NO: 1710 - protein, 18 aa, Artificial Sequence
  Description of Artificial Sequence: Synthetic peptide
CAADGVPEYSDYASGPVW

SEQ ID NO: 1711 - protein, 9 aa, Artificial Sequence
  Description of Artificial Sequence: Synthetic peptide
CAVDGPFGW

SEQ ID NO: 1712 - protein, 16 aa, Artificial Sequence
  Description of Artificial Sequence: Synthetic peptide
CTTDYSKLAITKLSYW

SEQ ID NO: 1713 - protein, 13 aa, Artificial Sequence
  Description of Artificial Sequence: Synthetic peptide
CAARRWIPPGPIW

SEQ ID NO: 1714 - protein, 16 aa, Artificial Sequence
  Description of Artificial Sequence: Synthetic peptide
CAAEVRNGSDYLPIDW

SEQ ID NO: 1715 - protein, 13 aa, Artificial Sequence
  Description of Artificial Sequence: Synthetic peptide
CAAQTEDSAQYIW

SEQ ID NO: 1716 - protein, 18 aa, Artificial Sequence
  Description of Artificial Sequence: Synthetic peptide
CAADGVPEYSDYASGPVW

SEQ ID NO: 1717 - protein, 18 aa, Artificial Sequence
  Description of Artificial Sequence: Synthetic peptide
CAADGVPEYSDYASGPVW

SEQ ID NO: 1718 - protein, 19 aa, Artificial Sequence
  Description of Artificial Sequence: Synthetic peptide
CATFPAIVTDSDYDLGNDW

SEQ ID NO: 1719 - protein, 20 aa, Artificial Sequence
  Description of Artificial Sequence: Synthetic peptide
CAVSQPLNYYTYYDARRYDW

SEQ ID NO: 1720 - protein, 13 aa, Artificial Sequence
  Description of Artificial Sequence: Synthetic peptide
CAARSVYSYDYNW

SEQ ID NO: 1721 - protein, 18 aa, Artificial Sequence
  Description of Artificial Sequence: Synthetic peptide
CAADGVPEYSDYASGPVW

SEQ ID NO: 1722 - protein, 18 aa, Artificial Sequence
  Description of Artificial Sequence: Synthetic peptide
CAAELHSSDYTSPGAYAW

SEQ ID NO: 1723 - protein, 17 aa, Artificial Sequence
  Description of Artificial Sequence: Synthetic peptide
CALPSNIITTDYLRVYW

SEQ ID NO: 1724 - protein, 12 aa, Artificial Sequence
  Description of Artificial Sequence: Synthetic peptide
CAKEDVGKPFDW

SEQ ID NO: 1725 - protein, 12 aa, Artificial Sequence
  Description of Artificial Sequence: Synthetic peptide
CAKEDVGKPFDW

SEQ ID NO: 1726 - protein, 13 aa, Artificial Sequence
  Description of Artificial Sequence: Synthetic peptide
CASAYNPGIGYDW

SEQ ID NO: 1727 - protein, 20 aa, Artificial Sequence
  Description of Artificial Sequence: Synthetic peptide
CAVSHPLNYYTYYDARRYDW

SEQ ID NO: 1728 - protein, 19 aa, Artificial Sequence
  Description of Artificial Sequence: Synthetic peptide
CAARRWMGGSYFDPGNYDW

SEQ ID NO: 1729 - protein, 12 aa, Artificial Sequence
  Description of Artificial Sequence: Synthetic peptide
CAKEDVGKPFDW

SEQ ID NO: 1730 - protein, 23 aa, Artificial Sequence
  Description of Artificial Sequence: Synthetic peptide
CARAPFYCTTTKCQDNYYYMDVW

SEQ ID NO: 1731 - protein, 20 aa, Artificial Sequence
  Description of Artificial Sequence: Synthetic peptide
CARERRYYDSSGYPYYFDYW

SEQ ID NO: 1732 - protein, 14 aa, Artificial Sequence
  Description of Artificial Sequence: Synthetic peptide
CAREDYYDSSGYSW

SEQ ID NO: 1733 - protein, 16 aa, Artificial Sequence
  Description of Artificial Sequence: Synthetic peptide
CANLAYYDSSGYYDYW

SEQ ID NO: 1734 - protein, 20 aa, Artificial Sequence
  Description of Artificial Sequence: Synthetic peptide
CAVVAMRMVTTEGPDVLDVW

SEQ ID NO: 1735 - protein, 10 aa, Artificial Sequence
  Description of Artificial Sequence: Synthetic peptide
CARWGPFDIW

SEQ ID NO: 1736 - protein, 14 aa, Artificial Sequence
  Description of Artificial Sequence: Synthetic peptide
CTRSEYSSGWYDYW

SEQ ID NO: 1737 - protein, 23 aa, Artificial Sequence
  Description of Artificial Sequence: Synthetic peptide
CARGAPYFDHGSKSYRLFYFDYW

SEQ ID NO: 1738 - protein, 20 aa, Artificial Sequence
  Description of Artificial Sequence: Synthetic peptide
CARGGPNYYASGRYPWFDPW

SEQ ID NO: 1739 - protein, 20 aa, Artificial Sequence
  Description of Artificial Sequence: Synthetic peptide
CAREGYYYDSSGYPYYFDYW

SEQ ID NO: 1740 - protein, 9 aa, Artificial Sequence
  Description of Artificial Sequence: Synthetic peptide
CATDPPLFW

SEQ ID NO: 1741 - protein, 15 aa, Artificial Sequence
  Description of Artificial Sequence: Synthetic peptide
CARASPNTGWHFDRW

SEQ ID NO: 1742 - protein, 9 aa, Artificial Sequence
  Description of Artificial Sequence: Synthetic peptide
CATDPPLFW

SEQ ID NO: 1743 - protein, 15 aa, Artificial Sequence
  Description of Artificial Sequence: Synthetic peptide
CAEPSPNTGWHFDHW

SEQ ID NO: 1744 - protein, 9 aa, Artificial Sequence
  Description of Artificial Sequence: Synthetic peptide
CATDPPLFW

SEQ ID NO: 1745 - protein, 9 aa, Artificial Sequence
  Description of Artificial Sequence: Synthetic peptide
CATDPPLFW

SEQ ID NO: 1746 - protein, 15 aa, Artificial Sequence
  Description of Artificial Sequence: Synthetic peptide
CATASPNTGWHFDHW

SEQ ID NO: 1747 - protein, 9 aa, Artificial Sequence
  Description of Artificial Sequence: Synthetic peptide
CATDPPLFW

SEQ ID NO: 1748 - protein, 9 aa, Artificial Sequence
  Description of Artificial Sequence: Synthetic peptide
CATDPPLFW

SEQ ID NO: 1749 - protein, 9 aa, Artificial Sequence
  Description of Artificial Sequence: Synthetic peptide
CATDPPLFW

SEQ ID NO: 1750 - protein, 9 aa, Artificial Sequence
  Description of Artificial Sequence: Synthetic peptide
CATDPPLFW

SEQ ID NO: 1751 - protein, 9 aa, Artificial Sequence
  Description of Artificial Sequence: Synthetic peptide
CATDPPLFW

SEQ ID NO: 1752 - protein, 9 aa, Artificial Sequence
  Description of Artificial Sequence: Synthetic peptide
CATDPPLFW

SEQ ID NO: 1753 - protein, 9 aa, Artificial Sequence
  Description of Artificial Sequence: Synthetic peptide
CATDPPLFW

SEQ ID NO: 1754 - protein, 9 aa, Artificial Sequence
  Description of Artificial Sequence: Synthetic peptide
CATDPPLFW

SEQ ID NO: 1755 - protein, 9 aa, Artificial Sequence
  Description of Artificial Sequence: Synthetic peptide
CATDPPLFW

SEQ ID NO: 1756 - protein, 9 aa, Artificial Sequence
  Description of Artificial Sequence: Synthetic peptide
CATDPPLFW

SEQ ID NO: 1757 - protein, 9 aa, Artificial Sequence
  Description of Artificial Sequence: Synthetic peptide
CATDPPLFW

SEQ ID NO: 1758 - protein, 9 aa, Artificial Sequence
  Description of Artificial Sequence: Synthetic peptide
CATDPPLFW

SEQ ID NO: 1759 - protein, 15 aa, Artificial Sequence
  Description of Artificial Sequence: Synthetic peptide
CATDPPLFWGHVDLW

SEQ ID NO: 1760 - protein, 9 aa, Artificial Sequence
  Description of Artificial Sequence: Synthetic peptide
CATDPPLFW

SEQ ID NO: 1761 - protein, 9 aa, Artificial Sequence
  Description of Artificial Sequence: Synthetic peptide
CATDPPLFW

SEQ ID NO: 1762 - protein, 9 aa, Artificial Sequence
  Description of Artificial Sequence: Synthetic peptide
CATDPPLFW

SEQ ID NO: 1763 - protein, 9 aa, Artificial Sequence
  Description of Artificial Sequence: Synthetic peptide
CATDPPLFW

SEQ ID NO: 1764 - protein, 13 aa, Artificial Sequence
  Description of Artificial Sequence: Synthetic peptide
CAASPSLRSAWQW

SEQ ID NO: 1765 - protein, 9 aa, Artificial Sequence
  Description of Artificial Sequence: Synthetic peptide
CATDPPLFW

SEQ ID NO: 1766 - protein, 15 aa, Artificial Sequence
  Description of Artificial Sequence: Synthetic peptide
CARATPNTGWHFDHW

SEQ ID NO: 1767 - protein, 9 aa, Artificial Sequence
  Description of Artificial Sequence: Synthetic peptide
CATDPPLFW

SEQ ID NO: 1768 - protein, 9 aa, Artificial Sequence
  Description of Artificial Sequence: Synthetic peptide
CATDPPLFW

SEQ ID NO: 1769 - protein, 9 aa, Artificial Sequence
  Description of Artificial Sequence: Synthetic peptide
CATDPPLFW

SEQ ID NO: 1770 - protein, 15 aa, Artificial Sequence
  Description of Artificial Sequence: Synthetic peptide
CATASPNTGWHFDHW

SEQ ID NO: 1771 - protein, 18 aa, Artificial Sequence
  Description of Artificial Sequence: Synthetic peptide
CAADRRGLASTRAGDYDW

SEQ ID NO: 1772 - protein, 20 aa, Artificial Sequence
  Description of Artificial Sequence: Synthetic peptide
CAADRGVYGGRWYRTSQYTW

SEQ ID NO: 1773 - protein, 15 aa, Artificial Sequence
  Description of Artificial Sequence: Synthetic peptide
CATDPPLFCWHFDHW

SEQ ID NO: 1774 - protein, 11 aa, Artificial Sequence
  Description of Artificial Sequence: Synthetic peptide
CATTMNPNPRW

SEQ ID NO: 1775 - protein, 15 aa, Artificial Sequence
  Description of Artificial Sequence: Synthetic peptide
CATAPPLFCWHFDHW

SEQ ID NO: 1776 - protein, 23 aa, Artificial Sequence
  Description of Artificial Sequence: Synthetic peptide
CATLPFYDFWSGYYTGYYYMDVW

SEQ ID NO: 1777 - protein, 9 aa, Artificial Sequence
  Description of Artificial Sequence: Synthetic peptide
CATDRPLFW

SEQ ID NO: 1778 - protein, 11 aa, Artificial Sequence
  Description of Artificial Sequence: Synthetic peptide
CATTENPNPRW

SEQ ID NO: 1779 - protein, 9 aa, Artificial Sequence
  Description of Artificial Sequence: Synthetic peptide
CATDPPLFW

SEQ ID NO: 1780 - protein, 15 aa, Artificial Sequence
  Description of Artificial Sequence: Synthetic peptide
CATDPPLFCCHVDLW

SEQ ID NO: 1781 - protein, 15 aa, Artificial Sequence
  Description of Artificial Sequence: Synthetic peptide
CATDPPLFWGHVDLW

SEQ ID NO: 1782 - protein, 9 aa, Artificial Sequence
  Description of Artificial Sequence: Synthetic peptide
CATDPPLFW

SEQ ID NO: 1783 - protein, 15 aa, Artificial Sequence
  Description of Artificial Sequence: Synthetic peptide
CATARPNTGWHFDHW

SEQ ID NO: 1784 - protein, 9 aa, Artificial Sequence
  Description of Artificial Sequence: Synthetic peptide
CATDPPLFW

SEQ ID NO: 1785 - protein, 15 aa, Artificial Sequence
  Description of Artificial Sequence: Synthetic peptide
CATDPPLFWGHVDLW

SEQ ID NO: 1786 - protein, 15 aa, Artificial Sequence
  Description of Artificial Sequence: Synthetic peptide
CAKASPNTGWHFDHW

SEQ ID NO: 1787 - protein, 9 aa, Artificial Sequence
  Description of Artificial Sequence: Synthetic peptide
CATDPPLFW

SEQ ID NO: 1788 - protein, 15 aa, Artificial Sequence
  Description of Artificial Sequence: Synthetic peptide
CARASPNTGWHFDHW

SEQ ID NO: 1789 - protein, 13 aa, Artificial Sequence
  Description of Artificial Sequence: Synthetic peptide
CAVPWMDYNRRDW

SEQ ID NO: 1790 - protein, 21 aa, Artificial Sequence
  Description of Artificial Sequence: Synthetic peptide
CAKGGYCSSDTCWWEYWLDPW

SEQ ID NO: 1791 - protein, 24 aa, Artificial Sequence
  Description of Artificial Sequence: Synthetic peptide
CARDLPASYYDSSGYYWHNGMDVW

SEQ ID NO: 1792 - protein, 17 aa, Artificial Sequence
  Description of Artificial Sequence: Synthetic peptide
CAREADCLPSPWYLDLW

SEQ ID NO: 1793 - protein, 12 aa, Artificial Sequence
  Description of Artificial Sequence: Synthetic peptide
CAREADGLHSPW

SEQ ID NO: 1794 - protein, 17 aa, Artificial Sequence
  Description of Artificial Sequence: Synthetic peptide
CAREADGLHSPWHFDLW

SEQ ID NO: 1795 - protein, 17 aa, Artificial Sequence
  Description of Artificial Sequence: Synthetic peptide
CAREADGLHSPWHFDLW

SEQ ID NO: 1796 - protein, 17 aa, Artificial Sequence
  Description of Artificial Sequence: Synthetic peptide
CAREADGLHSPWHFDLW

SEQ ID NO: 1797 - protein, 17 aa, Artificial Sequence
  Description of Artificial Sequence: Synthetic peptide
CAREADGLHSPWHFDLW

SEQ ID NO: 1798 - protein, 11 aa, Artificial Sequence
  Description of Artificial Sequence: Synthetic peptide
CARLIDAFDIW

SEQ ID NO: 1799 - protein, 17 aa, Artificial Sequence
  Description of Artificial Sequence: Synthetic peptide
CARQSDGLPSPWHFDLG

SEQ ID NO: 1800 - protein, 12 aa, Artificial Sequence
  Description of Artificial Sequence: Synthetic peptide
CVRHDEYSFDYW

SEQ ID NO: 1801 - protein, 12 aa, Artificial Sequence
  Description of Artificial Sequence: Synthetic peptide
CVRHDEYSFDYW

SEQ ID NO: 1802 - protein, 12 aa, Artificial Sequence
  Description of Artificial Sequence: Synthetic peptide
CVRHDEYSFDYW

SEQ ID NO: 1803 - protein, 12 aa, Artificial Sequence
  Description of Artificial Sequence: Synthetic peptide
CVRHDEYSFDYW

SEQ ID NO: 1804 - protein, 12 aa, Artificial Sequence
  Description of Artificial Sequence: Synthetic peptide
CVRHDEYSFDYW

SEQ ID NO: 1805 - protein, 18 aa, Artificial Sequence
  Description of Artificial Sequence: Synthetic peptide
CAKDRGYSSSWYGGFDYW

SEQ ID NO: 1806 - protein, 18 aa, Artificial Sequence
  Description of Artificial Sequence: Synthetic peptide
CARGLKFLEWLPSAFDIW

SEQ ID NO: 1807 - protein, 17 aa, Artificial Sequence
  Description of Artificial Sequence: Synthetic peptide
CARGTRFLEWSLPLDVW

SEQ ID NO: 1808 - protein, 17 aa, Artificial Sequence
  Description of Artificial Sequence: Synthetic peptide
CARGTRFLQWSLPLDVW

SEQ ID NO: 1809 - protein, 16 aa, Artificial Sequence
  Description of Artificial Sequence: Synthetic peptide
CARHAWWKGAGFFDHW

SEQ ID NO: 1810 - protein, 16 aa, Artificial Sequence
  Description of Artificial Sequence: Synthetic peptide
CARHTWWKGAGFFDHW

SEQ ID NO: 1811 - protein, 16 aa, Artificial Sequence
  Description of Artificial Sequence: Synthetic peptide
CARHTWWKGAGFFDHW

SEQ ID NO: 1812 - protein, 16 aa, Artificial Sequence
  Description of Artificial Sequence: Synthetic peptide
CARHTWWKGAGFFDHW

SEQ ID NO: 1813 - protein, 16 aa, Artificial Sequence
  Description of Artificial Sequence: Synthetic peptide
CARHTWWKGAGFFDHW

SEQ ID NO: 1814 - protein, 21 aa, Artificial Sequence
  Description of Artificial Sequence: Synthetic peptide
CARVKYLTTSSGWPRPYFDNW

SEQ ID NO: 1815 - protein, 21 aa, Artificial Sequence
  Description of Artificial Sequence: Synthetic peptide
CARVKYLTTSSGWPRPYFDNW

SEQ ID NO: 1816 - protein, 21 aa, Artificial Sequence
  Description of Artificial Sequence: Synthetic peptide
CARVKYLTTSSGWPRPYFDNW

SEQ ID NO: 1817 - protein, 21 aa, Artificial Sequence
  Description of Artificial Sequence: Synthetic peptide
CARVKYLTTSSGWPRPYFDNW

SEQ ID NO: 1818 - protein, 21 aa, Artificial Sequence
  Description of Artificial Sequence: Synthetic peptide
CARVKYLTTSSGWPRPYFDNW

SEQ ID NO: 1819 - protein, 16 aa, Artificial Sequence
  Description of Artificial Sequence: Synthetic peptide
CGRSKWPQANGAFDIW

SEQ ID NO: 1820 - protein, 21 aa, Artificial Sequence
  Description of Artificial Sequence: Synthetic peptide
CAKGGYCSSDTCWWEYWLDPW

SEQ ID NO: 1821 - protein, 17 aa, Artificial Sequence
  Description of Artificial Sequence: Synthetic peptide
CARQSDGLPSPWHFDLG

SEQ ID NO: 1822 - protein, 17 aa, Artificial Sequence
  Description of Artificial Sequence: Synthetic peptide
CAREADGLHSPWHFDLW

SEQ ID NO: 1823 - protein, 24 aa, Artificial Sequence
  Description of Artificial Sequence: Synthetic peptide
CARDLPASYYDSSGYYWHNGMDVW

SEQ ID NO: 1824 - protein, 17 aa, Artificial Sequence
  Description of Artificial Sequence: Synthetic peptide
CAREADGLHSPWHFDLW

SEQ ID NO: 1825 - protein, 12 aa, Artificial Sequence
  Description of Artificial Sequence: Synthetic peptide
CVRHDEYSFDYW

SEQ ID NO: 1826 - protein, 17 aa, Artificial Sequence
  Description of Artificial Sequence: Synthetic peptide
CAREADGLHSPWHFDLW

SEQ ID NO: 1827 - protein, 12 aa, Artificial Sequence
  Description of Artificial Sequence: Synthetic peptide
CVRHDEYSFDYW

SEQ ID NO: 1828 - protein, 12 aa, Artificial Sequence
  Description of Artificial Sequence: Synthetic peptide
CVRHDEYSFDYW

SEQ ID NO: 1829 - protein, 12 aa, Artificial Sequence
  Description of Artificial Sequence: Synthetic peptide
CAREADGLHSPW

SEQ ID NO: 1830 - protein, 12 aa, Artificial Sequence
  Description of Artificial Sequence: Synthetic peptide
CVRHDEYSFDYW

SEQ ID NO: 1831 - protein, 17 aa, Artificial Sequence
  Description of Artificial Sequence: Synthetic peptide
CAREADGLHSPWHFDLW

SEQ ID NO: 1832 - protein, 17 aa, Artificial Sequence
  Description of Artificial Sequence: Synthetic peptide
CAREADGLHSPWHFDLW

SEQ ID NO: 1833 - protein, 11 aa, Artificial Sequence
  Description of Artificial Sequence: Synthetic peptide
CARLIDAFDIW

SEQ ID NO: 1834 - protein, 11 aa, Artificial Sequence
  Description of Artificial Sequence: Synthetic peptide
CARLIDAFDIW

SEQ ID NO: 1835 - protein, 17 aa, Artificial Sequence
  Description of Artificial Sequence: Synthetic peptide
CTTGDDFWSGGNWFDPW

SEQ ID NO: 1836 - protein, 24 aa, Artificial Sequence
  Description of Artificial Sequence: Synthetic peptide
CARDLPASYYDSSGYYWHNGMDVW

SEQ ID NO: 1837 - protein, 15 aa, Artificial Sequence
  Description of Artificial Sequence: Synthetic peptide
CARVGGGYWYGIDVW

SEQ ID NO: 1838 - protein, 17 aa, Artificial Sequence
  Description of Artificial Sequence: Synthetic peptide
CARGYSRNWYPSWFDPW

SEQ ID NO: 1839 - protein, 10 aa, Artificial Sequence
  Description of Artificial Sequence: Synthetic peptide
CAGGWYLDYW

SEQ ID NO: 1840 - protein, 13 aa, Artificial Sequence
  Description of Artificial Sequence: Synthetic peptide
CASLCIVDPFDIW

SEQ ID NO: 1841 - protein, 12 aa, Artificial Sequence
  Description of Artificial Sequence: Synthetic peptide
CVRHDEYSFDYW

SEQ ID NO: 1842 - protein, 21 aa, Artificial Sequence
  Description of Artificial Sequence: Synthetic peptide
CARVKYLTTSSGWPRPYFDNW

SEQ ID NO: 1843 - protein, 16 aa, Artificial Sequence
  Description of Artificial Sequence: Synthetic peptide
CGRSKWPQANGAFDIW

SEQ ID NO: 1844 - protein, 18 aa, Artificial Sequence
  Description of Artificial Sequence: Synthetic peptide
CAKDRGYSSSWYGGFDYW

SEQ ID NO: 1845 - protein, 17 aa, Artificial Sequence
  Description of Artificial Sequence: Synthetic peptide
CARGTRFLQWSLPLDVW

SEQ ID NO: 1846 - protein, 16 aa, Artificial Sequence
  Description of Artificial Sequence: Synthetic peptide
CARHTWWKGAGFFDHW

SEQ ID NO: 1847 - protein, 17 aa, Artificial Sequence
  Description of Artificial Sequence: Synthetic peptide
CARGTRFLEWSLPLDVW

SEQ ID NO: 1848 - protein, 21 aa, Artificial Sequence
  Description of Artificial Sequence: Synthetic peptide
CARVKYLTTSSGWPRPYFDNW

SEQ ID NO: 1849 - protein, 16 aa, Artificial Sequence
  Description of Artificial Sequence: Synthetic peptide
CARHTWWKGAGFFDHW

SEQ ID NO: 1850 - protein, 16 aa, Artificial Sequence
  Description of Artificial Sequence: Synthetic peptide
CARHAWWKGAGFFDHW

SEQ ID NO: 1851 - protein, 21 aa, Artificial Sequence
  Description of Artificial Sequence: Synthetic peptide
CARVKYLTTSSGWPRPYFDNW

SEQ ID NO: 1852 - protein, 16 aa, Artificial Sequence
  Description of Artificial Sequence: Synthetic peptide
CARHTWWKGAGFFDHW

SEQ ID NO: 1853 - protein, 18 aa, Artificial Sequence
  Description of Artificial Sequence: Synthetic peptide
CARGLKFLEWLPSAFDIW

SEQ ID NO: 1854 - protein, 21 aa, Artificial Sequence
  Description of Artificial Sequence: Synthetic peptide
CARVKYLTTSSGWPRPYFDNW

SEQ ID NO: 1855 - protein, 21 aa, Artificial Sequence
  Description of Artificial Sequence: Synthetic peptide
CARVKYLTTSSGWPRPYFDNW

SEQ ID NO: 1856 - protein, 16 aa, Artificial Sequence
  Description of Artificial Sequence: Synthetic peptide
CARHTWWKGAGFFDHW

SEQ ID NO: 1857 - protein, 18 aa, Artificial Sequence
  Description of Artificial Sequence: Synthetic peptide
CARDAHGYYYDSSGYDDW

SEQ ID NO: 1858 - protein, 15 aa, Artificial Sequence
  Description of Artificial Sequence: Synthetic peptide
CAKGVYGSTVTTCHW

SEQ ID NO: 1859 - protein, 12 aa, Artificial Sequence
  Description of Artificial Sequence: Synthetic peptide
CARPTNWGFDYW

SEQ ID NO: 1860 - protein, 14 aa, Artificial Sequence
  Description of Artificial Sequence: Synthetic peptide
CARADSNWASSAYW

SEQ ID NO: 1861 - protein, 19 aa, Artificial Sequence
  Description of Artificial Sequence: Synthetic peptide
CARDPYSYGYYYYYGMDVW

SEQ ID NO: 1862 - protein, 13 aa, Artificial Sequence
  Description of Artificial Sequence: Synthetic peptide
CARARNWGPSDYW

SEQ ID NO: 1863 - protein, 18 aa, Artificial Sequence
  Description of Artificial Sequence: Synthetic peptide
CARDATYSSSWYNWFDPW

SEQ ID NO: 1864 - protein, 12 aa, Artificial Sequence
  Description of Artificial Sequence: Synthetic peptide
CARGTVTSFDFW

SEQ ID NO: 1865 - protein, 18 aa, Artificial Sequence
  Description of Artificial Sequence: Synthetic peptide
CAKDYHSASWFSAAADYW

SEQ ID NO: 1866 - protein, 18 aa, Artificial Sequence
  Description of Artificial Sequence: Synthetic peptide
CAREGQEYSSGSSYFDYW

SEQ ID NO: 1867 - protein, 21 aa, Artificial Sequence
  Description of Artificial Sequence: Synthetic peptide
CARGSQTPYCGGDCPETFDYW

SEQ ID NO: 1868 - protein, 16 aa, Artificial Sequence
  Description of Artificial Sequence: Synthetic peptide
CARDLYSSGWYGFDYW

SEQ ID NO: 1869 - protein, 20 aa, Artificial Sequence
  Description of Artificial Sequence: Synthetic peptide
CARDNYDFWSGYYTNWFDPW

SEQ ID NO: 1870 - protein, 25 aa, Artificial Sequence
  Description of Artificial Sequence: Synthetic peptide
CARDSLSVTMGRGVVTYYYYGMDFW

SEQ ID NO: 1871 - protein, 13 aa, Artificial Sequence
  Description of Artificial Sequence: Synthetic peptide
CARTTVTTPPLIW

SEQ ID NO: 1872 - protein, 11 aa, Artificial Sequence
  Description of Artificial Sequence: Synthetic peptide
CATTENPNPRW

SEQ ID NO: 1873 - protein, 9 aa, Artificial Sequence
  Description of Artificial Sequence: Synthetic peptide
CATDPPLFW

SEQ ID NO: 1874 - protein, 11 aa, Artificial Sequence
  Description of Artificial Sequence: Synthetic peptide
CATTEDPYPRW

SEQ ID NO: 1875 - protein, 15 aa, Artificial Sequence
  Description of Artificial Sequence: Synthetic peptide
CARASPNTGWHFDHW

SEQ ID NO: 1876 - protein, 11 aa, Artificial Sequence
  Description of Artificial Sequence: Synthetic peptide
CAAYQAGWGDW

SEQ ID NO: 1877 - protein, 11 aa, Artificial Sequence
  Description of Artificial Sequence: Synthetic peptide
CATTENPNPRW

SEQ ID NO: 1878 - protein, 15 aa, Artificial Sequence
  Description of Artificial Sequence: Synthetic peptide
CAKRANPTGAYFDYW

SEQ ID NO: 1879 - protein, 20 aa, Artificial Sequence
  Description of Artificial Sequence: Synthetic peptide
CAADRGVYGGRWYRTSQYTW

SEQ ID NO: 1880 - protein, 17 aa, Artificial Sequence
  Description of Artificial Sequence: Synthetic peptide
CAVKPGWVARDPSQYNW

SEQ ID NO: 1881 - protein, 13 aa, Artificial Sequence
  Description of Artificial Sequence: Synthetic peptide
CAASPSLRSAWQW

SEQ ID NO: 1882 - protein, 18 aa, Artificial Sequence
  Description of Artificial Sequence: Synthetic peptide
CAADRRGLASTRAADYDW

SEQ ID NO: 1883 - protein, 15 aa, Artificial Sequence
  Description of Artificial Sequence: Synthetic peptide
CATAPPLFCWHFDLW

SEQ ID NO: 1884 - protein, 15 aa, Artificial Sequence
  Description of Artificial Sequence: Synthetic peptide
CATDPPLFWGHVDLW

SEQ ID NO: 1885 - protein, 15 aa, Artificial Sequence
  Description of Artificial Sequence: Synthetic peptide
CATAPPNTGWHFDHW

SEQ ID NO: 1886 - protein, 15 aa, Artificial Sequence
  Description of Artificial Sequence: Synthetic peptide
CATATPNTGWHFDHW

SEQ ID NO: 1887 - protein, 9 aa, Artificial Sequence
  Description of Artificial Sequence: Synthetic peptide
CATDPPLFW

SEQ ID NO: 1888 - protein, 9 aa, Artificial Sequence
  Description of Artificial Sequence: Synthetic peptide
CATDPPLFW

SEQ ID NO: 1889 - protein, 9 aa, Artificial Sequence
  Description of Artificial Sequence: Synthetic peptide
CATDPPLFW

SEQ ID NO: 1890 - protein, 9 aa, Artificial Sequence
  Description of Artificial Sequence: Synthetic peptide
CATDPPLFW

SEQ ID NO: 1891 - protein, 9 aa, Artificial Sequence
  Description of Artificial Sequence: Synthetic peptide
CATDPPLFW

SEQ ID NO: 1892 - protein, 23 aa, Artificial Sequence
  Description of Artificial Sequence: Synthetic peptide
CATLPFYDFWSGYYTGYYYMDVW

SEQ ID NO: 1893 - protein, 9 aa, Artificial Sequence
  Description of Artificial Sequence: Synthetic peptide
CATDPPLFW

SEQ ID NO: 1894 - protein, 9 aa, Artificial Sequence
  Description of Artificial Sequence: Synthetic peptide
CATDPPLFW

SEQ ID NO: 1895 - protein, 15 aa, Artificial Sequence
  Description of Artificial Sequence: Synthetic peptide
CATASPNTGWHFDHW

SEQ ID NO: 1896 - protein, 18 aa, Artificial Sequence
  Description of Artificial Sequence: Synthetic peptide
CAADRRGLASTRAADYDW

SEQ ID NO: 1897 - protein, 15 aa, Artificial Sequence
  Description of Artificial Sequence: Synthetic peptide
CATEPPLSCWHFDLW

SEQ ID NO: 1898 - protein, 15 aa, Artificial Sequence
  Description of Artificial Sequence: Synthetic peptide
CATAPPNTGWHFDHW

SEQ ID NO: 1899 - protein, 15 aa, Artificial Sequence
  Description of Artificial Sequence: Synthetic peptide
CATDPPLFCCHFDLW

SEQ ID NO: 1900 - protein, 9 aa, Artificial Sequence
  Description of Artificial Sequence: Synthetic peptide
CATDPPLFW

SEQ ID NO: 1901 - protein, 9 aa, Artificial Sequence
  Description of Artificial Sequence: Synthetic peptide
CATDPPLFW

SEQ ID NO: 1902 - protein, 9 aa, Artificial Sequence
  Description of Artificial Sequence: Synthetic peptide
CATDPPLFW

SEQ ID NO: 1903 - protein, 9 aa, Artificial Sequence
  Description of Artificial Sequence: Synthetic peptide
CATDPPLFW

SEQ ID NO: 1904 - protein, 9 aa, Artificial Sequence
  Description of Artificial Sequence: Synthetic peptide
CATDPPLFW

SEQ ID NO: 1905 - protein, 9 aa, Artificial Sequence
  Description of Artificial Sequence: Synthetic peptide
CATDPPLFW

SEQ ID NO: 1906 - protein, 9 aa, Artificial Sequence
  Description of Artificial Sequence: Synthetic peptide
CATDPPLFW

SEQ ID NO: 1907 - protein, 9 aa, Artificial Sequence
  Description of Artificial Sequence: Synthetic peptide
CATDPPLFW

SEQ ID NO: 1908 - protein, 15 aa, Artificial Sequence
  Description of Artificial Sequence: Synthetic peptide
CATDPPLFWGHVDLW

SEQ ID NO: 1909 - protein, 9 aa, Artificial Sequence
  Description of Artificial Sequence: Synthetic peptide
CATDPPLFW

SEQ ID NO: 1910 - protein, 9 aa, Artificial Sequence
  Description of Artificial Sequence: Synthetic peptide
CATDPPLFW

SEQ ID NO: 1911 - protein, 18 aa, Artificial Sequence
  Description of Artificial Sequence: Synthetic peptide
CAADRRGLASTRAGDYDW

SEQ ID NO: 1912 - protein, 15 aa, Artificial Sequence
  Description of Artificial Sequence: Synthetic peptide
CATDPPLFWGHVDLW

SEQ ID NO: 1913 - protein, 9 aa, Artificial Sequence
  Description of Artificial Sequence: Synthetic peptide
CATDPPLFW

SEQ ID NO: 1914 - protein, 23 aa, Artificial Sequence
  Description of Artificial Sequence: Synthetic peptide
CARGGGWVPSSTSESLNWYFDRW

SEQ ID NO: 1915 - protein, 15 aa, Artificial Sequence
  Description of Artificial Sequence: Synthetic peptide
CATDPPLFCCHVDLW

SEQ ID NO: 1916 - protein, 9 aa, Artificial Sequence
  Description of Artificial Sequence: Synthetic peptide
CATDPPLFW

SEQ ID NO: 1917 - protein, 9 aa, Artificial Sequence
  Description of Artificial Sequence: Synthetic peptide
CATDPPLFW

SEQ ID NO: 1918 - protein, 15 aa, Artificial Sequence
  Description of Artificial Sequence: Synthetic peptide
CATDPPLFCWHFDHW

SEQ ID NO: 1919 - protein, 9 aa, Artificial Sequence
  Description of Artificial Sequence: Synthetic peptide
CATDPPLFW

SEQ ID NO: 1920 - protein, 9 aa, Artificial Sequence
  Description of Artificial Sequence: Synthetic peptide
CATDPPLFW

SEQ ID NO: 1921 - protein, 9 aa, Artificial Sequence
  Description of Artificial Sequence: Synthetic peptide
CATDPPLFW

SEQ ID NO: 1922 - protein, 9 aa, Artificial Sequence
  Description of Artificial Sequence: Synthetic peptide
CATDPPLFW

SEQ ID NO: 1923 - protein, 13 aa, Artificial Sequence
  Description of Artificial Sequence: Synthetic peptide
CAVPWMDYNRRDW

SEQ ID NO: 1924 - protein, 11 aa, Artificial Sequence
  Description of Artificial Sequence: Synthetic peptide
CATTMNPNPRW

SEQ ID NO: 1925 - protein, 9 aa, Artificial Sequence
  Description of Artificial Sequence: Synthetic peptide
CATDPPLFW

SEQ ID NO: 1926 - protein, 15 aa, Artificial Sequence
  Description of Artificial Sequence: Synthetic peptide
CATARPNTGWHFDHW

SEQ ID NO: 1927 - protein, 9 aa, Artificial Sequence
  Description of Artificial Sequence: Synthetic peptide
CATDPPLFW

SEQ ID NO: 1928 - protein, 9 aa, Artificial Sequence
  Description of Artificial Sequence: Synthetic peptide
CATDPPLFW

SEQ ID NO: 1929 - protein, 9 aa, Artificial Sequence
  Description of Artificial Sequence: Synthetic peptide
CATDPPLFW

SEQ ID NO: 1930 - protein, 9 aa, Artificial Sequence
  Description of Artificial Sequence: Synthetic peptide
CATDPPLFW

SEQ ID NO: 1931 - protein, 9 aa, Artificial Sequence
  Description of Artificial Sequence: Synthetic peptide
CATDPPLFW

SEQ ID NO: 1932 - protein, 9 aa, Artificial Sequence
  Description of Artificial Sequence: Synthetic peptide
CATDPPLFW

SEQ ID NO: 1933 - protein, 9 aa, Artificial Sequence
  Description of Artificial Sequence: Synthetic peptide
CATDPPLFW

SEQ ID NO: 1934 - protein, 15 aa, Artificial Sequence
  Description of Artificial Sequence: Synthetic peptide
CARASPNTGWHFDRW

SEQ ID NO: 1935 - protein, 9 aa, Artificial Sequence
  Description of Artificial Sequence: Synthetic peptide
CATDPPLFW

SEQ ID NO: 1936 - protein, 9 aa, Artificial Sequence
  Description of Artificial Sequence: Synthetic peptide
CATDRPLFW

SEQ ID NO: 1937 - protein, 15 aa, Artificial Sequence
  Description of Artificial Sequence: Synthetic peptide
CATASPNTGWHFDHW

SEQ ID NO: 1938 - protein, 9 aa, Artificial Sequence
  Description of Artificial Sequence: Synthetic peptide
CATDPPLFW

SEQ ID NO: 1939 - protein, 9 aa, Artificial Sequence
  Description of Artificial Sequence: Synthetic peptide
CATDPPLFW

SEQ ID NO: 1940 - protein, 9 aa, Artificial Sequence
  Description of Artificial Sequence: Synthetic peptide
CATDPPLFW

SEQ ID NO: 1941 - protein, 14 aa, Artificial Sequence
  Description of Artificial Sequence: Synthetic peptide
CAHRGGWLRPWGYW

SEQ ID NO: 1942 - protein, 9 aa, Artificial Sequence
  Description of Artificial Sequence: Synthetic peptide
CATDPPLFW

SEQ ID NO: 1943 - protein, 9 aa, Artificial Sequence
  Description of Artificial Sequence: Synthetic peptide
CATDPPLFW

SEQ ID NO: 1944 - protein, 9 aa, Artificial Sequence
  Description of Artificial Sequence: Synthetic peptide
CATDPPLFW

SEQ ID NO: 1945 - protein, 9 aa, Artificial Sequence
  Description of Artificial Sequence: Synthetic peptide
CATDPPLFW

SEQ ID NO: 1946 - protein, 15 aa, Artificial Sequence
  Description of Artificial Sequence: Synthetic peptide
CATDPPLFCWHFDHW

SEQ ID NO: 1947 - protein, 9 aa, Artificial Sequence
  Description of Artificial Sequence: Synthetic peptide
CATDPPLFW

SEQ ID NO: 1948 - protein, 15 aa, Artificial Sequence
  Description of Artificial Sequence: Synthetic peptide
CAEPSPNTGWHFDHW

SEQ ID NO: 1949 - protein, 9 aa, Artificial Sequence
  Description of Artificial Sequence: Synthetic peptide
CATDPPLFW

SEQ ID NO: 1950 - protein, 9 aa, Artificial Sequence
  Description of Artificial Sequence: Synthetic peptide
CATDPPLFW

SEQ ID NO: 1951 - protein, 15 aa, Artificial Sequence
  Description of Artificial Sequence: Synthetic peptide
CATAPPLFCWHFDHW

SEQ ID NO: 1952 - protein, 15 aa, Artificial Sequence
  Description of Artificial Sequence: Synthetic peptide
CAKASPNTGWHFDHW

SEQ ID NO: 1953 - protein, 9 aa, Artificial Sequence
  Description of Artificial Sequence: Synthetic peptide
CATDPPLFW

SEQ ID NO: 1954 - protein, 15 aa, Artificial Sequence
  Description of Artificial Sequence: Synthetic peptide
CARATPNTGWHFDHW

SEQ ID NO: 1955 - protein, 9 aa, Artificial Sequence
  Description of Artificial Sequence: Synthetic peptide
CATDPPLFW

SEQ ID NO: 1956 - protein, 15 aa, Artificial Sequence
  Description of Artificial Sequence: Synthetic peptide
CATDPPLFCCHFDHW

SEQ ID NO: 1957 - protein, 15 aa, Artificial Sequence
  Description of Artificial Sequence: Synthetic peptide
CATAPPNTGWHFDHW

SEQ ID NO: 1958 - protein, 18 aa, Artificial Sequence
  Description of Artificial Sequence: Synthetic peptide
CAADRRGLASTRAADYDW

SEQ ID NO: 1959 - protein, 17 aa, Artificial Sequence
  Description of Artificial Sequence: Synthetic peptide
CAAKPGWVARDPSQYNW

SEQ ID NO: 1960 - protein, 18 aa, Artificial Sequence
  Description of Artificial Sequence: Synthetic peptide
CAADRRGLASTRAADYDW

SEQ ID NO: 1961 - protein, 11 aa, Artificial Sequence
  Description of Artificial Sequence: Synthetic peptide
CATTENPNPRW

SEQ ID NO: 1962 - protein, 15 aa, Artificial Sequence
  Description of Artificial Sequence: Synthetic peptide
CAILVGPGQVEFDHW

SEQ ID NO: 1963 - protein, 22 aa, Artificial Sequence
  Description of Artificial Sequence: Synthetic peptide
CAALPFVCPSGSYSDYGDEYDW

SEQ ID NO: 1964 - protein, 9 aa, Artificial Sequence
  Description of Artificial Sequence: Synthetic peptide
CPTDPPLFW

SEQ ID NO: 1965 - protein, 14 aa, Artificial Sequence
  Description of Artificial Sequence: Synthetic peptide
CASLLAGDRYFDYW

SEQ ID NO: 1966 - protein, 18 aa, Artificial Sequence
  Description of Artificial Sequence: Synthetic peptide
CAADRRGLASTRAADYDW

SEQ ID NO: 1967 - protein, 17 aa, Artificial Sequence
  Description of Artificial Sequence: Synthetic peptide
CARDWRDRTWGNSLDYW

SEQ ID NO: 1968 - protein, 18 aa, Artificial Sequence
  Description of Artificial Sequence: Synthetic peptide
CAADRRGLASTRAADYDW

SEQ ID NO: 1969 - protein, 18 aa, Artificial Sequence
  Description of Artificial Sequence: Synthetic peptide
CAADRRGLASTRAADYDW

SEQ ID NO: 1970 - protein, 21 aa, Artificial Sequence
  Description of Artificial Sequence: Synthetic peptide
CARRVYYYDSSGPPGVTFDIW

SEQ ID NO: 1971 - protein, 14 aa, Artificial Sequence
  Description of Artificial Sequence: Synthetic peptide
CARQDSSSPYFDYW

SEQ ID NO: 1972 - protein, 18 aa, Artificial Sequence
  Description of Artificial Sequence: Synthetic peptide
CAADRRGLASTRAADYDW

SEQ ID NO: 1973 - protein, 21 aa, Artificial Sequence
  Description of Artificial Sequence: Synthetic peptide
CAQRVRGFFGPLRTTPSWYEW

SEQ ID NO: 1974 - protein, 23 aa, Artificial Sequence
  Description of Artificial Sequence: Synthetic peptide
CARTHYDFWSGYTSRTPNYFDYW

SEQ ID NO: 1975 - protein, 15 aa, Artificial Sequence
  Description of Artificial Sequence: Synthetic peptide
CAAVNTWTSPSFDSW

SEQ ID NO: 1976 - protein, 15 aa, Artificial Sequence
  Description of Artificial Sequence: Synthetic peptide
CAREVGPPPGYFDLW

SEQ ID NO: 1977 - protein, 18 aa, Artificial Sequence
  Description of Artificial Sequence: Synthetic peptide
CAAKGIWDYLGRRDFGDW

SEQ ID NO: 1978 - protein, 11 aa, Artificial Sequence
  Description of Artificial Sequence: Synthetic peptide
CATTENPNPRW

SEQ ID NO: 1979 - protein, 11 aa, Artificial Sequence
  Description of Artificial Sequence: Synthetic peptide
CVATPGGYGLW

SEQ ID NO: 1980 - protein, 20 aa, Artificial Sequence
  Description of Artificial Sequence: Synthetic peptide
CAADRGVYGGRWYRTSQYTW

SEQ ID NO: 1981 - protein, 15 aa, Artificial Sequence
  Description of Artificial Sequence: Synthetic peptide
CAAIAYEEGVYRWDW

SEQ ID NO: 1982 - protein, 14 aa, Artificial Sequence
  Description of Artificial Sequence: Synthetic peptide
CASGPPYSNYFAYW

SEQ ID NO: 1983 - protein, 15 aa, Artificial Sequence
  Description of Artificial Sequence: Synthetic peptide
CAKIMGSGRPYFDHW

SEQ ID NO: 1984 - protein, 15 aa, Artificial Sequence
  Description of Artificial Sequence: Synthetic peptide
CARPSSDLQGGVDYW

SEQ ID NO: 1985 - protein, 18 aa, Artificial Sequence
  Description of Artificial Sequence: Synthetic peptide
CAAKGIWDYLGRRDFGDW

SEQ ID NO: 1986 - protein, 17 aa, Artificial Sequence
  Description of Artificial Sequence: Synthetic peptide
CAAKPGWVARDPSEYNW

SEQ ID NO: 1987 - protein, 14 aa, Artificial Sequence
  Description of Artificial Sequence: Synthetic peptide
CARFARGSPYFDFW

SEQ ID NO: 1988 - protein, 16 aa, Artificial Sequence
  Description of Artificial Sequence: Synthetic peptide
CARGGGYYGSGSFEYW

SEQ ID NO: 1989 - protein, 18 aa, Artificial Sequence
  Description of Artificial Sequence: Synthetic peptide
CARGTAVGRPPPGGMDVW

SEQ ID NO: 1990 - protein, 14 aa, Artificial Sequence
  Description of Artificial Sequence: Synthetic peptide
CARVPPGQAYFDSW

SEQ ID NO: 1991 - protein, 18 aa, Artificial Sequence
  Description of Artificial Sequence: Synthetic peptide
CAKGGSWYYDSSGYYGRW

SEQ ID NO: 1992 - protein, 13 aa, Artificial Sequence
  Description of Artificial Sequence: Synthetic peptide
CAADRYGPPWYDW

SEQ ID NO: 1993 - protein, 14 aa, Artificial Sequence
  Description of Artificial Sequence: Synthetic peptide
CARIGLRGRYFDLW

SEQ ID NO: 1994 - protein, 13 aa, Artificial Sequence
  Description of Artificial Sequence: Synthetic peptide
CAVPWMDYNRRDW

SEQ ID NO: 1995 - protein, 13 aa, Artificial Sequence
  Description of Artificial Sequence: Synthetic peptide
CARTSGSYSFDYW

SEQ ID NO: 1996 - protein, 18 aa, Artificial Sequence
  Description of Artificial Sequence: Synthetic peptide
CAADRRGLASTRAADYDW

SEQ ID NO: 1997 - protein, 18 aa, Artificial Sequence
  Description of Artificial Sequence: Synthetic peptide
CAAKGIWDYLGRRDFGDW

SEQ ID NO: 1998 - protein, 14 aa, Artificial Sequence
  Description of Artificial Sequence: Synthetic peptide
CARDDSSSPYFDYW

SEQ ID NO: 1999 - protein, 11 aa, Artificial Sequence
  Description of Artificial Sequence: Synthetic peptide
CATTMNPNPRW

SEQ ID NO: 2000 - protein, 11 aa, Artificial Sequence
  Description of Artificial Sequence: Synthetic peptide
CATTENPNPRW

SEQ ID NO: 2001 - protein, 18 aa, Artificial Sequence
  Description of Artificial Sequence: Synthetic peptide
CAADRRGLASTRAADYDW

SEQ ID NO: 2002 - protein, 15 aa, Artificial Sequence
  Description of Artificial Sequence: Synthetic peptide
CATTSPNTGWHYYRW

SEQ ID NO: 2003 - protein, 21 aa, Artificial Sequence
  Description of Artificial Sequence: Synthetic peptide
CARWGPGPAGGSPGLVGFDYW

SEQ ID NO: 2004 - protein, 11 aa, Artificial Sequence
  Description of Artificial Sequence: Synthetic peptide
CAAYQRGWGDW

SEQ ID NO: 2005 - protein, 17 aa, Artificial Sequence
  Description of Artificial Sequence: Synthetic peptide
CAAKPGWVARDPSEYNW

SEQ ID NO: 2006 - protein, 9 aa, Artificial Sequence
  Description of Artificial Sequence: Synthetic peptide
CATDPPLFW

SEQ ID NO: 2007 - protein, 20 aa, Artificial Sequence
  Description of Artificial Sequence: Synthetic peptide
CAKISKDDGGKPRGAFFDSW

SEQ ID NO: 2008 - protein, 15 aa, Artificial Sequence
  Description of Artificial Sequence: Synthetic peptide
CARLATGPQAYFHHW

SEQ ID NO: 2009 - protein, 14 aa, Artificial Sequence
  Description of Artificial Sequence: Synthetic peptide
CARVGRGTTAFDSW

SEQ ID NO: 2010 - protein, 21 aa, Artificial Sequence
  Description of Artificial Sequence: Synthetic peptide
CAQRVRGFFGPLRTTPSWYEW

SEQ ID NO: 2011 - protein, 14 aa, Artificial Sequence
  Description of Artificial Sequence: Synthetic peptide
CASLLAGDRYFDYW

SEQ ID NO: 2012 - protein, 12 aa, Artificial Sequence
  Description of Artificial Sequence: Synthetic peptide
CAKEDVGKPFDW

SEQ ID NO: 2013 - protein, 17 aa, Artificial Sequence
  Description of Artificial Sequence: Synthetic peptide
CASWDGLIGLDAYEYDW

SEQ ID NO: 2014 - protein, 12 aa, Artificial Sequence
  Description of Artificial Sequence: Synthetic peptide
CAAFDGYTGSDW

SEQ ID NO: 2015 - protein, 12 aa, Artificial Sequence
  Description of Artificial Sequence: Synthetic peptide
CAADDCYIGCGW

SEQ ID NO: 2016 - protein, 21 aa, Artificial Sequence
  Description of Artificial Sequence: Synthetic peptide
CAAELHSSDYTSPGAESDYGW

SEQ ID NO: 2017 - protein, 21 aa, Artificial Sequence
  Description of Artificial Sequence: Synthetic peptide
CAASASDYGLGLELFHDEYNW

SEQ ID NO: 2018 - protein, 10 aa, Artificial Sequence
  Description of Artificial Sequence: Synthetic peptide
CATVATALIW

SEQ ID NO: 2019 - protein, 18 aa, Artificial Sequence
  Description of Artificial Sequence: Synthetic peptide
CAAELHSSDYTSPGAYAW

SEQ ID NO: 2020 - protein, 10 aa, Artificial Sequence
  Description of Artificial Sequence: Synthetic peptide
CAAIGDGAVW

SEQ ID NO: 2021 - protein, 13 aa, Artificial Sequence
  Description of Artificial Sequence: Synthetic peptide
CALQPFGASNYRW

SEQ ID NO: 2022 - protein, 10 aa, Artificial Sequence
  Description of Artificial Sequence: Synthetic peptide
CAAESWGRQW

SEQ ID NO: 2023 - protein, 11 aa, Artificial Sequence
  Description of Artificial Sequence: Synthetic peptide
CATSGSGSPNW

SEQ ID NO: 2024 - protein, 12 aa, Artificial Sequence
  Description of Artificial Sequence: Synthetic peptide
CAAYLDGYSGSW

SEQ ID NO: 2025 - protein, 12 aa, Artificial Sequence
  Description of Artificial Sequence: Synthetic peptide
CAGFDGYTGSDW

SEQ ID NO: 2026 - protein, 12 aa, Artificial Sequence
  Description of Artificial Sequence: Synthetic peptide
CARGRYGIVERW

SEQ ID NO: 2027 - protein, 13 aa, Artificial Sequence
  Description of Artificial Sequence: Synthetic peptide
CAARRWIPPGPIW

SEQ ID NO: 2028 - protein, 10 aa, Artificial Sequence
  Description of Artificial Sequence: Synthetic peptide
CALDIDYRDW

SEQ ID NO: 2029 - protein, 25 aa, Artificial Sequence
  Description of Artificial Sequence: Synthetic peptide
CAADVYPQDYGLGYVEGKMYYGMDW

SEQ ID NO: 2030 - protein, 11 aa, Artificial Sequence
  Description of Artificial Sequence: Synthetic peptide
CAAYGSGEFDW

SEQ ID NO: 2031 - protein, 10 aa, Artificial Sequence
  Description of Artificial Sequence: Synthetic peptide
CAARRWGYDW

SEQ ID NO: 2032 - protein, 19 aa, Artificial Sequence
  Description of Artificial Sequence: Synthetic peptide
CATFPAIVTDSDYDLGNDW

SEQ ID NO: 2033 - protein, 19 aa, Artificial Sequence
  Description of Artificial Sequence: Synthetic peptide
CASGSDNRARELSRYEYVW

SEQ ID NO: 2034 - protein, 12 aa, Artificial Sequence
  Description of Artificial Sequence: Synthetic peptide
CAAFDGYSGSDW

SEQ ID NO: 2035 - protein, 13 aa, Artificial Sequence
  Description of Artificial Sequence: Synthetic peptide
CALQPFGASSYRW

SEQ ID NO: 2036 - protein, 12 aa, Artificial Sequence
  Description of Artificial Sequence: Synthetic peptide
CAAFDGYSGNHW

SEQ ID NO: 2037 - protein, 19 aa, Artificial Sequence
  Description of Artificial Sequence: Synthetic peptide
CAARTSYNGRYDYIDDYSW

SEQ ID NO: 2038 - protein, 18 aa, Artificial Sequence
  Description of Artificial Sequence: Synthetic peptide
CAAAAGSTWYGTLYEYDW

SEQ ID NO: 2039 - protein, 9 aa, Artificial Sequence
  Description of Artificial Sequence: Synthetic peptide
CAVDGPFGW

SEQ ID NO: 2040 - protein, 11 aa, Artificial Sequence
  Description of Artificial Sequence: Synthetic peptide
CAKDWATGLAW

SEQ ID NO: 2041 - protein, 15 aa, Artificial Sequence
  Description of Artificial Sequence: Synthetic peptide
CAADVSPSYGSRWYW

SEQ ID NO: 2042 - protein, 12 aa, Artificial Sequence
  Description of Artificial Sequence: Synthetic peptide
CAAFDGYTGNYW

SEQ ID NO: 2043 - protein, 11 aa, Artificial Sequence
  Description of Artificial Sequence: Synthetic peptide
CASDESDAANW

SEQ ID NO: 2044 - protein, 8 aa, Artificial Sequence
  Description of Artificial Sequence: Synthetic peptide
CATNDDDV

SEQ ID NO: 2045 - protein, 18 aa, Artificial Sequence
  Description of Artificial Sequence: Synthetic peptide
CAAYRIVVGGTSPGDWRW

SEQ ID NO: 2046 - protein, 12 aa, Artificial Sequence
  Description of Artificial Sequence: Synthetic peptide
CALRRRFGGQEW

SEQ ID NO: 2047 - protein, 12 aa, Artificial Sequence
  Description of Artificial Sequence: Synthetic peptide
CAADNDMGYCSW

SEQ ID NO: 2048 - protein, 18 aa, Artificial Sequence
  Description of Artificial Sequence: Synthetic peptide
CAADGVPEYSDYASGPVW

SEQ ID NO: 2049 - protein, 16 aa, Artificial Sequence
  Description of Artificial Sequence: Synthetic peptide
CAAEVRNGSDYLPIDW

SEQ ID NO: 2050 - protein, 10 aa, Artificial Sequence
  Description of Artificial Sequence: Synthetic peptide
CAVDIDYRDW

SEQ ID NO: 2051 - protein, 12 aa, Artificial Sequence
  Description of Artificial Sequence: Synthetic peptide
CAELDGYFFAHW

SEQ ID NO: 2052 - protein, 11 aa, Artificial Sequence
  Description of Artificial Sequence: Synthetic peptide
CASTDDYGVDW

SEQ ID NO: 2053 - protein, 12 aa, Artificial Sequence
  Description of Artificial Sequence: Synthetic peptide
CAIAHGSSTYNW

SEQ ID NO: 2054 - protein, 13 aa, Artificial Sequence
  Description of Artificial Sequence: Synthetic peptide
CASAYDRGIGYDW

SEQ ID NO: 2055 - protein, 18 aa, Artificial Sequence
  Description of Artificial Sequence: Synthetic peptide
CAADRAADFFAQRDEYDW

SEQ ID NO: 2056 - protein, 12 aa, Artificial Sequence
  Description of Artificial Sequence: Synthetic peptide
CAAFDGGSGTQW

SEQ ID NO: 2057 - protein, 10 aa, Artificial Sequence
  Description of Artificial Sequence: Synthetic peptide
CATVGITLNW

SEQ ID NO: 2058 - protein, 13 aa, Artificial Sequence
  Description of Artificial Sequence: Synthetic peptide
CAARSVYSYEYNW

SEQ ID NO: 2059 - protein, 10 aa, Artificial Sequence
  Description of Artificial Sequence: Synthetic peptide
CALDIDYRHW

SEQ ID NO: 2060 - protein, 16 aa, Artificial Sequence
  Description of Artificial Sequence: Synthetic peptide
CAADRTYSYSSTGYYW

SEQ ID NO: 2061 - protein, 13 aa, Artificial Sequence
  Description of Artificial Sequence: Synthetic peptide
CASAYNPGIGYDW

SEQ ID NO: 2062 - protein, 18 aa, Artificial Sequence
  Description of Artificial Sequence: Synthetic peptide
CAAAAGTTWYGTLYEYDW

SEQ ID NO: 2063 - protein, 17 aa, Artificial Sequence
  Description of Artificial Sequence: Synthetic peptide
CAALIKPSSTDRIFEEW

SEQ ID NO: 2064 - protein, 11 aa, Artificial Sequence
  Description of Artificial Sequence: Synthetic peptide
CAARRWGYHYW

SEQ ID NO: 2065 - protein, 12 aa, Artificial Sequence
  Description of Artificial Sequence: Synthetic peptide
CAAFDGYTGRDW

SEQ ID NO: 2066 - protein, 18 aa, Artificial Sequence
  Description of Artificial Sequence: Synthetic peptide
CATTFGDAGIPDQYDFGW

SEQ ID NO: 2067 - protein, 8 aa, Artificial Sequence
  Description of Artificial Sequence: Synthetic peptide
CADINGDW

SEQ ID NO: 2068 - protein, 6 aa, Artificial Sequence
  Description of Artificial Sequence: Synthetic peptide
CAPFGW

SEQ ID NO: 2069 - protein, 15 aa, Artificial Sequence
  Description of Artificial Sequence: Synthetic peptide
CAADVSPSYGGRWYW

SEQ ID NO: 2070 - protein, 19 aa, Artificial Sequence
  Description of Artificial Sequence: Synthetic peptide
CAADLLGDSDYEPSSGFGW

SEQ ID NO: 2071 - protein, 15 aa, Artificial Sequence
  Description of Artificial Sequence: Synthetic peptide
CAAIAYEEGVYRWDW

SEQ ID NO: 2072 - protein, 10 aa, Artificial Sequence
  Description of Artificial Sequence: Synthetic peptide
CAAHGWGCHW

SEQ ID NO: 2073 - protein, 18 aa, Artificial Sequence
  Description of Artificial Sequence: Synthetic peptide
CAASAIGSGALRRFEYDW

SEQ ID NO: 2074 - protein, 15 aa, Artificial Sequence
  Description of Artificial Sequence: Synthetic peptide
CAAGNGGRYGIVERW

SEQ ID NO: 2075 - protein, 18 aa, Artificial Sequence
  Description of Artificial Sequence: Synthetic peptide
CAARKIYRSLSYYGDYDW

SEQ ID NO: 2076 - protein, 15 aa, Artificial Sequence
  Description of Artificial Sequence: Synthetic peptide
CAALIDYGLGFPIEW

SEQ ID NO: 2077 - protein, 12 aa, Artificial Sequence
  Description of Artificial Sequence: Synthetic peptide
CAAFDGYSGIDW

SEQ ID NO: 2078 - protein, 10 aa, Artificial Sequence
  Description of Artificial Sequence: Synthetic peptide
CAADIFFVNW

SEQ ID NO: 2079 - protein, 20 aa, Artificial Sequence
  Description of Artificial Sequence: Synthetic peptide
CAAEPYIPVRTMRHMTFLTW

SEQ ID NO: 2080 - protein, 11 aa, Artificial Sequence
  Description of Artificial Sequence: Synthetic peptide
CARVDYYMDVW

SEQ ID NO: 2081 - protein, 15 aa, Artificial Sequence
  Description of Artificial Sequence: Synthetic peptide
CARGPDSSGYGFDYW

SEQ ID NO: 2082 - protein, 11 aa, Artificial Sequence
  Description of Artificial Sequence: Synthetic peptide
CARVDRDFDYW

SEQ ID NO: 2083 - protein, 16 aa, Artificial Sequence
  Description of Artificial Sequence: Synthetic peptide
CANLAYYDSSGYYDYW

SEQ ID NO: 2084 - protein, 11 aa, Artificial Sequence
  Description of Artificial Sequence: Synthetic peptide
CTTVDQYFDYW

SEQ ID NO: 2085 - protein, 14 aa, Artificial Sequence
  Description of Artificial Sequence: Synthetic peptide
CAREDYYDSSGYSW

SEQ ID NO: 2086 - protein, 11 aa, Artificial Sequence
  Description of Artificial Sequence: Synthetic peptide
CARADDYFDYW

SEQ ID NO: 2087 - protein, 21 aa, Artificial Sequence
  Description of Artificial Sequence: Synthetic peptide
CAGYSTFGSSSAYYYYSMDVG

SEQ ID NO: 2088 - protein, 10 aa, Artificial Sequence
  Description of Artificial Sequence: Synthetic peptide
CARWGPFDIW

SEQ ID NO: 2089 - protein, 20 aa, Artificial Sequence
  Description of Artificial Sequence: Synthetic peptide
CARDDKYYDSSGYPAYFQHW

SEQ ID NO: 2090 - protein, 8 aa, Artificial Sequence [sequence omitted]

SEQ ID NO: 2091 - protein, 11 aa, Artificial Sequence
  Description of Artificial Sequence: Synthetic peptide
CARVDDYMDVW

SEQ ID NO: 2092 - protein, 18 aa, Artificial Sequence
  Description of Artificial Sequence: Synthetic peptide
CAFLVGPQGVDHGAFDVW

SEQ ID NO: 2093 - protein, 11 aa, Artificial Sequence
  Description of Artificial Sequence: Synthetic peptide
CASDYYYMDVW

SEQ ID NO: 2094 - protein, 13 aa, Artificial Sequence
  Description of Artificial Sequence: Synthetic peptide
CAKEGRAGSLDYW

SEQ ID NO: 2095 - protein, 18 aa, Artificial Sequence
  Description of Artificial Sequence: Synthetic peptide
CATFGATVTATNDAFDIW

SEQ ID NO: 2096 - protein, 19 aa, Artificial Sequence
  Description of Artificial Sequence: Synthetic peptide
CARLATSHQDGTGYLFDYW

SEQ ID NO: 2097 - protein, 20 aa, Artificial Sequence
  Description of Artificial Sequence: Synthetic peptide
CAREGYYYDSSGYLNYFDYW

SEQ ID NO: 2098 - protein, 15 aa, Artificial Sequence
  Description of Artificial Sequence: Synthetic peptide
CAIGYYDSSGYFDYW

SEQ ID NO: 2099 - protein, 19 aa, Artificial Sequence
  Description of Artificial Sequence: Synthetic peptide
CARDRYYDTSASYFESETW

SEQ ID NO: 2100 - protein, 14 aa, Artificial Sequence
  Description of Artificial Sequence: Synthetic peptide
CARSNTGWYSFDYW

SEQ ID NO: 2101 - protein, 13 aa, Artificial Sequence
  Description of Artificial Sequence: Synthetic peptide
CVRVTSDYSMDSW

SEQ ID NO: 2102 - protein, 14 aa, Artificial Sequence
  Description of Artificial Sequence: Synthetic peptide
CVRLSSGYYDFDYW

SEQ ID NO: 2103 - protein, 23 aa, Artificial Sequence
  Description of Artificial Sequence: Synthetic peptide
CARAPFYCTTTKCQDNYYYMDVW

SEQ ID NO: 2104 - protein, 18 aa, Artificial Sequence
  Description of Artificial Sequence: Synthetic peptide
CARGGDYDFWSVDYMDVW

SEQ ID NO: 2105 - protein, 11 aa, Artificial Sequence
  Description of Artificial Sequence: Synthetic peptide
CARVTTSFDYW

SEQ ID NO: 2106 - protein, 11 aa, Artificial Sequence
  Description of Artificial Sequence: Synthetic peptide
CATDYSAFDMW

SEQ ID NO: 2107 - protein, 14 aa, Artificial Sequence
  Description of Artificial Sequence: Synthetic peptide
CARVTSSLSGMDVW

SEQ ID NO: 2108 - protein, 14 aa, Artificial Sequence
  Description of Artificial Sequence: Synthetic peptide
CAREGYYDSSGYYW

SEQ ID NO: 2109 - protein, 11 aa, Artificial Sequence
  Description of Artificial Sequence: Synthetic peptide
CARADGYFDYW

SEQ ID NO: 2110 - protein, 14 aa, Artificial Sequence
  Description of Artificial Sequence: Synthetic peptide
CATFNWNDEGFDFW

SEQ ID NO: 2111 - protein, 19 aa, Artificial Sequence
  Description of Artificial Sequence: Synthetic peptide
CATDFYGWGTRERDAFDIW

SEQ ID NO: 2112 - protein, 15 aa, Artificial Sequence
  Description of Artificial Sequence: Synthetic peptide
CASLIAAQDYYFDYW

SEQ ID NO: 2113 - protein, 14 aa, Artificial Sequence
  Description of Artificial Sequence: Synthetic peptide
CATYCSSTSCFDYW

SEQ ID NO: 2114 - protein, 14 aa, Artificial Sequence
  Description of Artificial Sequence: Synthetic peptide
CARELGYSSTVWPW

SEQ ID NO: 2115 - protein, 18 aa, Artificial Sequence
  Description of Artificial Sequence: Synthetic peptide
CASLLHTGPSGGNYFDYW

SEQ ID NO: 2116 - protein, 14 aa, Artificial Sequence
  Description of Artificial Sequence: Synthetic peptide
CARVSSGDYGMDVW

SEQ ID NO: 2117 - protein, 11 aa, Artificial Sequence
  Description of Artificial Sequence: Synthetic peptide
CAKVDSGYDYW

SEQ ID NO: 2118 - protein, 20 aa, Artificial Sequence
  Description of Artificial Sequence: Synthetic peptide
CHGLGEGDPYGDYEGYFDLW

SEQ ID NO: 2119 - protein, 15 aa, Artificial Sequence
  Description of Artificial Sequence: Synthetic peptide
CAREVLRQQVVLDYW

SEQ ID NO: 2120 - protein, 24 aa, Artificial Sequence
  Description of Artificial Sequence: Synthetic peptide
CAGLHYYYDSSGYNPTEYYGMDVW

SEQ ID NO: 2121 - protein, 15 aa, Artificial Sequence
  Description of Artificial Sequence: Synthetic peptide
CTHVQNSYYYAMDVW

SEQ ID NO: 2122 - protein, 21 aa, Artificial Sequence
  Description of Artificial Sequence: Synthetic peptide
CTTLGAVYFDSSGYHDYFDYW

SEQ ID NO: 2123 - protein, 15 aa, Artificial Sequence
  Description of Artificial Sequence: Synthetic peptide
CFGLLEVYDMTFDYW

SEQ ID NO: 2124 - protein, 16 aa, Artificial Sequence
  Description of Artificial Sequence: Synthetic peptide
CASLGYCSGGSCFDYW

SEQ ID NO: 2125 - protein, 16 aa, Artificial Sequence
  Description of Artificial Sequence: Synthetic peptide
CAALGILFGYDAFDIW

SEQ ID NO: 2126 - protein, 19 aa, Artificial Sequence
  Description of Artificial Sequence: Synthetic peptide
CAKEGYYDSTGYRTYFQQW

SEQ ID NO: 2127 - protein, 12 aa, Artificial Sequence
  Description of Artificial Sequence: Synthetic peptide
CATTGTVTLGYW

SEQ ID NO: 2128 - protein, 16 aa, Artificial Sequence [sequence omitted]

SEQ ID NO: 2129 - protein, 13 aa, Artificial Sequence
  Description of Artificial Sequence: Synthetic peptide
CARVTNYDAFDIW

SEQ ID NO: 2130 - protein, 18 aa, Artificial Sequence
  Description of Artificial Sequence: Synthetic peptide
CARDSGEHFWDSGYIDHW

SEQ ID NO: 2131 - protein, 11 aa, Artificial Sequence
  Description of Artificial Sequence: Synthetic peptide
CARVDSRFDYW

SEQ ID NO: 2132 - protein, 13 aa, Artificial Sequence
  Description of Artificial Sequence: Synthetic peptide
CARVDDFGYFDLW

SEQ ID NO: 2133 - protein, 19 aa, Artificial Sequence
  Description of Artificial Sequence: Synthetic peptide
CGRHWGIYDSSGFSSFDYW

SEQ ID NO: 2134 - protein, 11 aa, Artificial Sequence
  Description of Artificial Sequence: Synthetic peptide
CASVDGYFDYW

SEQ ID NO: 2135 - protein, 14 aa, Artificial Sequence
  Description of Artificial Sequence: Synthetic peptide
CARALGVTYQFDYW

SEQ ID NO: 2136 - protein, 14 aa, Artificial Sequence
  Description of Artificial Sequence: Synthetic peptide
CASFSGGPADFDYW

SEQ ID NO: 2137 - protein, 17 aa, Artificial Sequence
  Description of Artificial Sequence: Synthetic peptide
CLSVTGDTEDYGVFDTW

SEQ ID NO: 2138 - protein, 15 aa, Artificial Sequence
  Description of Artificial Sequence: Synthetic peptide
CAHWSWELGDWFDPW

SEQ ID NO: 2139 - protein, 18 aa, Artificial Sequence
  Description of Artificial Sequence: Synthetic peptide
CAGLLRYSGTYYDAFDVW

SEQ ID NO: 2140 - protein, 12 aa, Artificial Sequence
  Description of Artificial Sequence: Synthetic peptide
CAGLGWNYMDYW

SEQ ID NO: 2141 - protein, 13 aa, Artificial Sequence
  Description of Artificial Sequence: Synthetic peptide
CATHNSLSGFDYW

SEQ ID NO: 2142 - protein, 12 aa, Artificial Sequence
  Description of Artificial Sequence: Synthetic peptide
CWRLGNDYFDYW

SEQ ID NO: 2143 - protein, 12 aa, Artificial Sequence
  Description of Artificial Sequence: Synthetic peptide
CGGGYGYHFDYW

SEQ ID NO: 2144 - protein, 22 aa, Artificial Sequence
  Description of Artificial Sequence: Synthetic peptide
CWMYYYDSSGYYGNYYYGMDVW

SEQ ID NO: 2145 - protein, 22 aa, Artificial Sequence
  Description of Artificial Sequence: Synthetic peptide
CARGNTKYYYDSSGYSSAFDYW

SEQ ID NO: 2146 - protein, 15 aa, Artificial Sequence
  Description of Artificial Sequence: Synthetic peptide
CWIVGPGPLDGMDVW

SEQ ID NO: 2147 - protein, 16 aa, Artificial Sequence
  Description of Artificial Sequence: Synthetic peptide
CVHLASQTGAGYFDLW

SEQ ID NO: 2148 - protein, 13 aa, Artificial Sequence
  Description of Artificial Sequence: Synthetic peptide
CARYDFWSGYPYW

SEQ ID NO: 2149 - protein, 17 aa, Artificial Sequence
  Description of Artificial Sequence: Synthetic peptide
CAREILWFGEFGEPNVW

SEQ ID NO: 2150 - protein, 16 aa, Artificial Sequence
  Description of Artificial Sequence: Synthetic peptide
CARLHYYDSSGYFDYW

SEQ ID NO: 2151 - protein, 15 aa, Artificial Sequence
  Description of Artificial Sequence: Synthetic peptide
CARDSSATRTGPDYW

SEQ ID NO: 2152 - protein, 12 aa, Artificial Sequence
  Description of Artificial Sequence: Synthetic peptide
CARLGGEGFDYW

SEQ ID NO: 2153 - protein, 15 aa, Artificial Sequence
  Description of Artificial Sequence: Synthetic peptide
CARGLLWFGELFGYW

SEQ ID NO: 2154 - protein, 16 aa, Artificial Sequence
  Description of Artificial Sequence: Synthetic peptide
CVRHSGTDGDSSFDYW

SEQ ID NO: 2155 - protein, 11 aa, Artificial Sequence
  Description of Artificial Sequence: Synthetic peptide
CARFFRAHDYW

SEQ ID NO: 2156 - protein, 11 aa, Artificial Sequence
  Description of Artificial Sequence: Synthetic peptide
CARADYDFDYW

SEQ ID NO: 2157 - protein, 17 aa, Artificial Sequence
  Description of Artificial Sequence: Synthetic peptide
CAKFGRKIVGATELDYW

SEQ ID NO: 2158 - protein, 19 aa, Artificial Sequence
  Description of Artificial Sequence: Synthetic peptide
CARSPSFSQIYYYYYMDVW

SEQ ID NO: 2159 - protein, 20 aa, Artificial Sequence
  Description of Artificial Sequence: Synthetic peptide
CAVVAMRMVTTEGPDVLDVW

SEQ ID NO: 2160 - protein, 20 aa, Artificial Sequence
  Description of Artificial Sequence: Synthetic peptide
CAREGYYYDSSGYPYYFDYW

SEQ ID NO: 2161 - protein, 14 aa, Artificial Sequence
  Description of Artificial Sequence: Synthetic peptide
CARLSQGMVALDYW

SEQ ID NO: 2162 - protein, 17 aa, Artificial Sequence
  Description of Artificial Sequence: Synthetic peptide
CAKDGGYGELHYGMEVW

SEQ ID NO: 2163 - protein, 8 aa, Artificial Sequence [sequence omitted]

SEQ ID NO: 2164 - protein, 10 aa, Artificial Sequence
  Description of Artificial Sequence: Synthetic peptide
CALFGDFDYW

SEQ ID NO: 2165 - protein, 14 aa, Artificial Sequence
  Description of Artificial Sequence: Synthetic peptide
CVRLSSGYFDFDYW

SEQ ID NO: 2166 - protein, 13 aa, Artificial Sequence
  Description of Artificial Sequence: Synthetic peptide
CARFAGWDAFDIW

SEQ ID NO: 2167 - protein, 15 aa, Artificial Sequence
  Description of Artificial Sequence: Synthetic peptide
CARLSSDGYNYFDFW

SEQ ID NO: 2168 - protein, 11 aa, Artificial Sequence
  Description of Artificial Sequence: Synthetic peptide
CTTVDQYFNYW

SEQ ID NO: 2169 - protein, 16 aa, Artificial Sequence
  Description of Artificial Sequence: Synthetic peptide
CATGECDGGSCSLAYW

SEQ ID NO: 2170 - protein, 15 aa, Artificial Sequence
  Description of Artificial Sequence: Synthetic peptide
CVRFGSSWARDLDQW

SEQ ID NO: 2171 - protein, 9 aa, Artificial Sequence
  Description of Artificial Sequence: Synthetic peptide
CTETGTAAW

SEQ ID NO: 2172 - protein, 18 aa, Artificial Sequence
  Description of Artificial Sequence: Synthetic peptide
CLKVLGGDYEADNWFDYW

SEQ ID NO: 2173 - protein, 18 aa, Artificial Sequence
  Description of Artificial Sequence: Synthetic peptide
CARSLYYDRSGSYYFDYW

SEQ ID NO: 2174 - protein, 22 aa, Artificial Sequence
  Description of Artificial Sequence: Synthetic peptide
CARDIGYYDSSGYYNDGGFDYW

SEQ ID NO: 2175 - protein, 21 aa, Artificial Sequence
  Description of Artificial Sequence: Synthetic peptide
CAGHATFGGSSSSYYYGMDVW

SEQ ID NO: 2176 - protein, 12 aa, Artificial Sequence
  Description of Artificial Sequence: Synthetic peptide
CLRLSSSGFDHW

SEQ ID NO: 2177 - protein, 20 aa, Artificial Sequence
  Description of Artificial Sequence: Synthetic peptide
CAKSDGLMGELRSASAFDIW

SEQ ID NO: 2178 - protein, 11 aa, Artificial Sequence
  Description of Artificial Sequence: Synthetic peptide
CTHANDYGDYW

SEQ ID NO: 2179 - protein, 15 aa, Artificial Sequence
  Description of Artificial Sequence: Synthetic peptide
CARLLVREDWYFDLW

SEQ ID NO: 2180 - protein, 11 aa, Artificial Sequence
  Description of Artificial Sequence: Synthetic peptide
CAYNNSSGEYW

SEQ ID NO: 2181 - protein, 14 aa, Artificial Sequence
  Description of Artificial Sequence: Synthetic peptide
CAGDYNFWSGFDHW

SEQ ID NO: 2182 - protein, 14 aa, Artificial Sequence
  Description of Artificial Sequence: Synthetic peptide
CAKKLGGYYAFDIW

SEQ ID NO: 2183 - protein, 11 aa, Artificial Sequence [sequence omitted]

SEQ ID NO: 2184 - protein, 12 aa, Artificial Sequence
  Description of Artificial Sequence: Synthetic peptide
CAIEIVVGGIYW

SEQ ID NO: 2185 - protein, 11 aa, Artificial Sequence
  Description of Artificial Sequence: Synthetic peptide
CATDLYYMDVW

SEQ ID NO: 2186 - protein, 14 aa, Artificial Sequence
  Description of Artificial Sequence: Synthetic peptide
CTTFNWNDEGFDYW

SEQ ID NO: 2187 - protein, 20 aa, Artificial Sequence
  Description of Artificial Sequence: Synthetic peptide
CARERYWNPLPYYYYGMDVW

SEQ ID NO: 2188 - protein, 24 aa, Artificial Sequence
  Description of Artificial Sequence: Synthetic peptide
CARGPFYMYCSGTKCYSTNWFDPW

SEQ ID NO: 2189 - protein, 17 aa, Artificial Sequence
  Description of Artificial Sequence: Synthetic peptide
CARGEIDILTGYWYDYW

SEQ ID NO: 2190 - protein, 21 aa, Artificial Sequence
  Description of Artificial Sequence: Synthetic peptide
CTTLLYYYDSSGYSFDAFDIW

SEQ ID NO: 2191 - protein, 21 aa, Artificial Sequence
  Description of Artificial Sequence: Synthetic peptide
CTALLYYFDNSGYNFDPFDIW

SEQ ID NO: 2192 - protein, 18 aa, Artificial Sequence
  Description of Artificial Sequence: Synthetic peptide
CAARRSQILFTSRTDYEW

SEQ ID NO: 2193 - protein, 22 aa, Artificial Sequence
  Description of Artificial Sequence: Synthetic peptide
CAAVNTFDESAYAAFACYDVVW

SEQ ID NO: 2194 - protein, 18 aa, Artificial Sequence
  Description of Artificial Sequence: Synthetic peptide
CAASSVFSDLRYRKNPKW

SEQ ID NO: 2195 - protein, 9 aa, Artificial Sequence
  Description of Artificial Sequence: Synthetic peptide
CAIAGRGRW

SEQ ID NO: 2196 - protein, 18 aa, Artificial Sequence
  Description of Artificial Sequence: Synthetic peptide
CAKTKRTGIFTTARMVDW

SEQ ID NO: 2197 - protein, 24 aa, Artificial Sequence
  Description of Artificial Sequence: Synthetic peptide
CAIEPGTIRNWRNRVPFARGNFGW

SEQ ID NO: 2198 - protein, 13 aa, Artificial Sequence
  Description of Artificial Sequence: Synthetic peptide
CAARRWIPPGPIW

SEQ ID NO: 2199 - protein, 17 aa, Artificial Sequence
  Description of Artificial Sequence: Synthetic peptide
CAAKRLRSFASGGSYDW

SEQ ID NO: 2200 - protein, 18 aa, Artificial Sequence
  Description of Artificial Sequence: Synthetic peptide
CAARRRVTLFTSRADYDW

SEQ ID NO: 2201 - protein, 13 aa, Artificial Sequence
  Description of Artificial Sequence: Synthetic peptide
CAARRWIPPGPIW

SEQ ID NO: 2202 - protein, 18 aa, Artificial Sequence
  Description of Artificial Sequence: Synthetic peptide
CAAKGIWDYLGRRDFGDW

SEQ ID NO: 2203 - protein, 23 aa, Artificial Sequence
  Description of Artificial Sequence: Synthetic peptide
CARQTFDFWSASLGGNFWYFDLW

SEQ ID NO: 2204 - protein, 9 aa, Artificial Sequence [sequence omitted]

SEQ ID NO: 2205 - protein, 16 aa, Artificial Sequence
  Description of Artificial Sequence: Synthetic peptide
CTRGGGRFFDWLYLRW

SEQ ID NO: 2206 - protein, 21 aa, Artificial Sequence
  Description of Artificial Sequence: Synthetic peptide
CARGHGRYFDWLLFARPPDYW

SEQ ID NO: 2207 - protein, 16 aa, Artificial Sequence
  Description of Artificial Sequence: Synthetic peptide
CAKRTIFGVGRWLDPW

SEQ ID NO: 2208 - protein, 20 aa, Artificial Sequence
  Description of Artificial Sequence: Synthetic peptide
CSKDRAPNCFACCPNGFDVW

SEQ ID NO: 2209 - protein, 12 aa, Artificial Sequence
  Description of Artificial Sequence: Synthetic peptide
CARGRFLGGTEW

SEQ ID NO: 2210 - protein, 18 aa, Artificial Sequence
  Description of Artificial Sequence: Synthetic peptide
CARGRTIFFGGGRYFDYW

SEQ ID NO: 2211 - protein, 25 aa, Artificial Sequence
  Description of Artificial Sequence: Synthetic peptide
CARGARIFGSVAPWRGGNYYGMDVW

SEQ ID NO: 2212 - protein, 15 aa, Artificial Sequence
  Description of Artificial Sequence: Synthetic peptide
CARASGLWFRRPHVW

SEQ ID NO: 2213 - protein, 21 aa, Artificial Sequence
  Description of Artificial Sequence: Synthetic peptide
CARVSRRPRSPPGYYYGMDVW

SEQ ID NO: 2214 - protein, 20 aa, Artificial Sequence
  Description of Artificial Sequence: Synthetic peptide
CTRARLRYFDWLFPTNFDYW

SEQ ID NO: 2215 - protein, 17 aa, Artificial Sequence
  Description of Artificial Sequence: Synthetic peptide
CARRVRRLWFRSYFDLW

SEQ ID NO: 2216 - protein, 16 aa, Artificial Sequence
  Description of Artificial Sequence: Synthetic peptide
CARERARWFGKFSVSW

SEQ ID NO: 2217 - protein, 11 aa, Artificial Sequence
  Description of Artificial Sequence: Synthetic peptide
SACGRLGFGAW

SEQ ID NO: 2218 - protein, 21 aa, Artificial Sequence
  Description of Artificial Sequence: Synthetic peptide
CARGGPPRLWGSYRRKYFDYW

SEQ ID NO: 2219 - protein, 13 aa, Artificial Sequence
  Description of Artificial Sequence: Synthetic peptide
CARGLGWLLGYYW

SEQ ID NO: 2220 - protein, 17 aa, Artificial Sequence
  Description of Artificial Sequence: Synthetic peptide
CTTSARSGWFWRYFDSW

SEQ ID NO: 2221 - protein, 20 aa, Artificial Sequence
  Description of Artificial Sequence: Synthetic peptide
CARRGLLQWFGAPNSWFDPW

SEQ ID NO: 2222 - protein, 19 aa, Artificial Sequence
  Description of Artificial Sequence: Synthetic peptide
CTTERDGLLWFRELFRPSW

SEQ ID NO: 2223 - protein, 16 aa, Artificial Sequence
  Description of Artificial Sequence: Synthetic peptide
CAKVHSYVWGGHSDYW

SEQ ID NO: 2224 - protein, 20 aa, Artificial Sequence
  Description of Artificial Sequence: Synthetic peptide
CARVRFSRLGGVIGRPIDSW

SEQ ID NO: 2225 - protein, 16 aa, Artificial Sequence
  Description of Artificial Sequence: Synthetic peptide
CAKDRGVLWFGELWYW

SEQ ID NO: 2226 - protein, 24 aa, Artificial Sequence
  Description of Artificial Sequence: Synthetic peptide
CASGKGGSATIFHLSRRPLYFDYW

SEQ ID NO: 2227 - protein, 20 aa, Artificial Sequence
  Description of Artificial Sequence: Synthetic peptide
CAKRKNRGPLWFGGGGWGYW

SEQ ID NO: 2228 - protein, 21 aa, Artificial Sequence
  Description of Artificial Sequence: Synthetic peptide
CARRVAYSSFWSGLRKHMDVW

SEQ ID NO: 2229 - protein, 14 aa, Artificial Sequence
  Description of Artificial Sequence: Synthetic peptide
CASRRRWLTPYIFW

SEQ ID NO: 2230 - protein, 12 aa, Artificial Sequence
  Description of Artificial Sequence: Synthetic peptide
CAAISIFGRLKW

SEQ ID NO: 2231 - protein, 21 aa, Artificial Sequence
  Description of Artificial Sequence: Synthetic peptide
CARVGPLRFLAQRPRLRPDYW

SEQ ID NO: 2232 - protein, 15 aa, Artificial Sequence
  Description of Artificial Sequence: Synthetic peptide
CAREWGRWLQRGSYW

SEQ ID NO: 2233 - protein, 24 aa, Artificial Sequence
  Description of Artificial Sequence: Synthetic peptide
CARGSGSGFMWYHGNNNYDRWRYW

SEQ ID NO: 2234 - protein, 19 aa, Artificial Sequence
  Description of Artificial Sequence: Synthetic peptide
CARGRYDFWSGYYRWFDPW

SEQ ID NO: 2235 - protein, 22 aa, Artificial Sequence
  Description of Artificial Sequence: Synthetic peptide
CATVPPPRRFLEWLPRRLTYIW

SEQ ID NO: 2236 - protein, 13 aa, Artificial Sequence
  Description of Artificial Sequence: Synthetic peptide
CARMSGFPFLDYW

SEQ ID NO: 2237 - protein, 18 aa, Artificial Sequence
  Description of Artificial Sequence: Synthetic peptide
CARTRGIFLWFGESFDYW

SEQ ID NO: 2238 - protein, 18 aa, Artificial Sequence
  Description of Artificial Sequence: Synthetic peptide
CARGGPRFGGFRGYFDPW

SEQ ID NO: 2239 - protein, 14 aa, Artificial Sequence
  Description of Artificial Sequence: Synthetic peptide
CARVTRWFGGLDVW

SEQ ID NO: 2240 - protein, 18 aa, Artificial Sequence
  Description of Artificial Sequence: Synthetic peptide
CARHHGLGILWWGTMDVW

SEQ ID NO: 2241 - protein, 15 aa, Artificial Sequence
  Description of Artificial Sequence: Synthetic peptide
CAKRSTWLPQHFDSW

SEQ ID NO: 2242 - protein, 16 aa, Artificial Sequence
  Description of Artificial Sequence: Synthetic peptide
CARGVRGVFRAYFDHW

SEQ ID NO: 2243 - protein, 23 aa, Artificial Sequence
  Description of Artificial Sequence: Synthetic peptide
CARGTSFFNFWSGSLGRVGFDSW

SEQ ID NO: 2244 - protein, 18 aa, Artificial Sequence
  Description of Artificial Sequence: Synthetic peptide
CTTAGVLRYFDWFRRPYW

SEQ ID NO: 2245 - protein, 21 aa, Artificial Sequence
  Description of Artificial Sequence: Synthetic peptide
CTTDGLRYFDWFPWASAFDIW

SEQ ID NO: 2246 - protein, 13 aa, Artificial Sequence
  Description of Artificial Sequence: Synthetic peptide
CARKGRWSGMNVW

SEQ ID NO: 2247 - protein, 21 aa, Artificial Sequence
  Description of Artificial Sequence: Synthetic peptide
CARSTGPRGSGRYRAHWFDSW

SEQ ID NO: 2248 - protein, 13 aa, Artificial Sequence
  Description of Artificial Sequence: Synthetic peptide
CSPSSWPFYFGAW

SEQ ID NO: 2249 - protein, 24 aa, Artificial Sequence
  Description of Artificial Sequence: Synthetic peptide
CARGTPWRLLWFGTLGPPPAFDYW

SEQ ID NO: 2250 - protein, 16 aa, Artificial Sequence
  Description of Artificial Sequence: Synthetic peptide
CARQHQDFWTGYYTVW

SEQ ID NO: 2251 - protein, 18 aa, Artificial Sequence
  Description of Artificial Sequence: Synthetic peptide
CAKEGWRWLQLRGGFDYW

SEQ ID NO: 2252 - protein, 17 aa, Artificial Sequence
  Description of Artificial Sequence: Synthetic peptide
CARRGKLSAAMHWFDPW

SEQ ID NO: 2253 - protein, 13 aa, Artificial Sequence
  Description of Artificial Sequence: Synthetic peptide
CARDRGIFGVSRW

SEQ ID NO: 2254 - protein, 11 aa, Artificial Sequence
  Description of Artificial Sequence: Synthetic peptide
CARGSGWWEYW

SEQ ID NO: 2255 - protein, 19 aa, Artificial Sequence
  Description of Artificial Sequence: Synthetic peptide
CARGFGRRFLEWLPRFDYW

SEQ ID NO: 2256 - protein, 16 aa, Artificial Sequence
  Description of Artificial Sequence: Synthetic peptide
CAHFRRFLPRGYVDYW

SEQ ID NO: 2257 - protein, 22 aa, Artificial Sequence
  Description of Artificial Sequence: Synthetic peptide
CARQQYYDFWSGYFRSGYFDLW

SEQ ID NO: 2258 - protein, 22 aa, Artificial Sequence
  Description of Artificial Sequence: Synthetic peptide
CATVPPPRRFLEWLPRRLTYTW

SEQ ID NO: 2259 - protein, 17 aa, Artificial Sequence
  Description of Artificial Sequence: Synthetic peptide
CAKERESRFLKWRKTDW

SEQ ID NO: 2260 - protein, 17 aa, Artificial Sequence
  Description of Artificial Sequence: Synthetic peptide
CARHDSIGLFRHGMDVW

SEQ ID NO: 2261 - protein, 20 aa, Artificial Sequence
  Description of Artificial Sequence: Synthetic peptide
CARDRGFGFWSGLRGYFDLW

SEQ ID NO: 2262 - protein, 20 aa, Artificial Sequence
  Description of Artificial Sequence: Synthetic peptide
CAKRKKRGPLWFGGGGWGYW

SEQ ID NO: 2263 - protein, 12 aa, Artificial Sequence
  Description of Artificial Sequence: Synthetic peptide
CARRHWFGFDYW

SEQ ID NO: 2264 - protein, 14 aa, Artificial Sequence
  Description of Artificial Sequence: Synthetic peptide
CARGYKGYYYMDVW

SEQ ID NO: 2265 - protein, 13 aa, Artificial Sequence
  Description of Artificial Sequence: Synthetic peptide
CAKENWLGYFDPW

SEQ ID NO: 2266 - protein, 12 aa, Artificial Sequence
  Description of Artificial Sequence: Synthetic peptide
CAGSYGAYFDYW

SEQ ID NO: 2267 - protein, 13 aa, Artificial Sequence
  Description of Artificial Sequence: Synthetic peptide
CAREEPVYGMDVW

SEQ ID NO: 2268 - protein, 12 aa, Artificial Sequence
  Description of Artificial Sequence: Synthetic peptide
CAGSYGAYFDYW

SEQ ID NO: 2269 - protein, 16 aa, Artificial Sequence
  Description of Artificial Sequence: Synthetic peptide
CARTNSGSYYGPFDYW

SEQ ID NO: 2270 - protein, 14 aa, Artificial Sequence
  Description of Artificial Sequence: Synthetic peptide
CARGYKGYYYMDVW

SEQ ID NO: 2271 - protein, 14 aa, Artificial Sequence
  Description of Artificial Sequence: Synthetic peptide
CARGYKGYYYMDVW

SEQ ID NO: 2272 - protein, 16 aa, Artificial Sequence
  Description of Artificial Sequence: Synthetic peptide
CARPSSGSYFPPFDYW

SEQ ID NO: 2273 - protein, 13 aa, Artificial Sequence
  Description of Artificial Sequence: Synthetic peptide
CAKENWLGYFDPW

SEQ ID NO: 2274 - protein, 12 aa, Artificial Sequence
  Description of Artificial Sequence: Synthetic peptide
CARYQGGYMDVW

SEQ ID NO: 2275 - protein, 12 aa, Artificial Sequence
  Description of Artificial Sequence: Synthetic peptide
CARDTGLGFDPW

SEQ ID NO: 2276 - protein, 16 aa, Artificial Sequence
  Description of Artificial Sequence: Synthetic peptide
CAKTMGGSYFDAFDIW

SEQ ID NO: 2277 - protein, 16 aa, Artificial Sequence
  Description of Artificial Sequence: Synthetic peptide
CARSSSGSYPSLVDYW

SEQ ID NO: 2278 - protein, 13 aa, Artificial Sequence
  Description of Artificial Sequence: Synthetic peptide
CARDYWVDYFKPG

SEQ ID NO: 2279 - protein, 12 aa, Artificial Sequence
  Description of Artificial Sequence: Synthetic peptide
CARDTGLGFDPW

SEQ ID NO: 2280 - protein, 12 aa, Artificial Sequence
  Description of Artificial Sequence: Synthetic peptide
CARDTGLGFDPW

SEQ ID NO: 2281 - protein, 12 aa, Artificial Sequence
  Description of Artificial Sequence: Synthetic peptide
CARDTGLGFDPW

SEQ ID NO: 2282 - protein, 12 aa, Artificial Sequence
  Description of Artificial Sequence: Synthetic peptide
CARDTGLGFDPW

SEQ ID NO: 2283 - protein, 12 aa, Artificial Sequence
  Description of Artificial Sequence: Synthetic peptide
CARDTGLGFDPW

SEQ ID NO: 2284 - protein, 12 aa, Artificial Sequence
  Description of Artificial Sequence: Synthetic peptide
CARDTGLGFDPW

SEQ ID NO: 2285 - protein, 16 aa, Artificial Sequence
  Description of Artificial Sequence: Synthetic peptide
CARDISRYGYYGMDVW

SEQ ID NO: 2286 - protein, 12 aa, Artificial Sequence
  Description of Artificial Sequence: Synthetic peptide
CAGSYGAYFDYW

SEQ ID NO: 2287 - protein, 16 aa, Artificial Sequence
  Description of Artificial Sequence: Synthetic peptide
CAKTNSGSYGGMFDYW

SEQ ID NO: 2288 - protein, 20 aa, Artificial Sequence
  Description of Artificial Sequence: Synthetic peptide
CAKDNYYDSSGYYGGGMDVW

SEQ ID NO: 2289 - protein, 16 aa, Artificial Sequence
  Description of Artificial Sequence: Synthetic peptide
CARSRSGSYSSYFDYW

SEQ ID NO: 2290 - protein, 16 aa, Artificial Sequence
  Description of Artificial Sequence: Synthetic peptide
CAGEYYDSSGSSIDYW

SEQ ID NO: 2291 - protein, 16 aa, Artificial Sequence
  Description of Artificial Sequence: Synthetic peptide
CARAKGGGYRGAFDIW

SEQ ID NO: 2292 - protein, 16 aa, Artificial Sequence
  Description of Artificial Sequence: Synthetic peptide
CARPRGGSYWTYFDYW

SEQ ID NO: 2293 - protein, 12 aa, Artificial Sequence
  Description of Artificial Sequence: Synthetic peptide
CAGSYGAYFDYW

SEQ ID NO: 2294 - protein, 19 aa, Artificial Sequence
  Description of Artificial Sequence: Synthetic peptide
CARDYNDGIGSYTGAFDSW

SEQ ID NO: 2295 - protein, 11 aa, Artificial Sequence
  Description of Artificial Sequence: Synthetic peptide
CLREGILWDVW

SEQ ID NO: 2296 - protein, 16 aa, Artificial Sequence
  Description of Artificial Sequence: Synthetic peptide
CAKTEGGTYGGAFDIW

SEQ ID NO: 2297 - protein, 20 aa, Artificial Sequence
  Description of Artificial Sequence: Synthetic peptide
CAKDNYYDSSGYYGGGMDVW

SEQ ID NO: 2298 - protein, 12 aa, Artificial Sequence
  Description of Artificial Sequence: Synthetic peptide
CARDGWGYFDYW

SEQ ID NO: 2299 - protein, 13 aa, Artificial Sequence
  Description of Artificial Sequence: Synthetic peptide
CARDDYMYGFEHW

SEQ ID NO: 2300 - protein, 13 aa, Artificial Sequence
  Description of Artificial Sequence: Synthetic peptide
CAKDLGPAGVDYW

SEQ ID NO: 2301 - protein, 16 aa, Artificial Sequence
  Description of Artificial Sequence: Synthetic peptide
CARSRSGSYSSWFDYW

SEQ ID NO: 2302 - protein, 16 aa, Artificial Sequence
  Description of Artificial Sequence: Synthetic peptide
CAKTGSGSYYSWFDYW

SEQ ID NO: 2303 - protein, 16 aa, Artificial Sequence
  Description of Artificial Sequence: Synthetic peptide
CARTRGGSYFTPFDYW

SEQ ID NO: 2304 - protein, 16 aa, Artificial Sequence
  Description of Artificial Sequence: Synthetic peptide
CASPHSGSYWAAFDIW

SEQ ID NO: 2305 - protein, 16 aa, Artificial Sequence
  Description of Artificial Sequence: Synthetic peptide
CARPQGGSYFAAFDIW

SEQ ID NO: 2306 - protein, 16 aa, Artificial Sequence
  Description of Artificial Sequence: Synthetic peptide
CARPSSGSYFPPFDYW

SEQ ID NO: 2307 - protein, 16 aa, Artificial Sequence
  Description of Artificial Sequence: Synthetic peptide
CAKTRTGSYFSAFDIW

SEQ ID NO: 2308 - protein, 16 aa, Artificial Sequence
  Description of Artificial Sequence: Synthetic peptide
CAKPHSGSYRGYFDYW

SEQ ID NO: 2309 - protein, 16 aa, Artificial Sequence
  Description of Artificial Sequence: Synthetic peptide
CARPKSGSYATYFDYW

SEQ ID NO: 2310 - protein, 16 aa, Artificial Sequence
  Description of Artificial Sequence: Synthetic peptide
CARPRGGSYHGAFDIW

SEQ ID NO: 2311 - protein, 16 aa, Artificial Sequence
  Description of Artificial Sequence: Synthetic peptide
CAKSRGGSYYGAFDYW

SEQ ID NO: 2312 - protein, 16 aa, Artificial Sequence
  Description of Artificial Sequence: Synthetic peptide
CARGESGSYWGAFDYW

SEQ ID NO: 2313 - protein, 16 aa, Artificial Sequence
  Description of Artificial Sequence: Synthetic peptide
CARPSSGSYLGFFDYW

SEQ ID NO: 2314 - protein, 16 aa, Artificial Sequence
  Description of Artificial Sequence: Synthetic peptide
CARTRGGSYYGAFDYW

SEQ ID NO: 2315 - protein, 16 aa, Artificial Sequence
  Description of Artificial Sequence: Synthetic peptide
CAKSYSGSYSSYFDYW

SEQ ID NO: 2316 - protein, 16 aa, Artificial Sequence
  Description of Artificial Sequence: Synthetic peptide
CAKAYSGSYMGYFDYW

SEQ ID NO: 2317 - protein, 16 aa, Artificial Sequence
  Description of Artificial Sequence: Synthetic peptide
CARPLSGSYWSWFDPW

SEQ ID NO: 2318 - protein, 16 aa, Artificial Sequence
  Description of Artificial Sequence: Synthetic peptide
CARGKGGGYYSSFDFW

SEQ ID NO: 2319 - protein, 16 aa, Artificial Sequence
  Description of Artificial Sequence: Synthetic peptide
CARPYSGSYISWFDYW

SEQ ID NO: 2320 - protein, 16 aa, Artificial Sequence
  Description of Artificial Sequence: Synthetic peptide
CARTLGGSYFAAFDIW

SEQ ID NO: 2321 - protein, 16 aa, Artificial Sequence
  Description of Artificial Sequence: Synthetic peptide
CARPHSGSYTAYFDYW

SEQ ID NO: 2322 - protein, 15 aa, Artificial Sequence
  Description of Artificial Sequence: Synthetic peptide
CARGYGGSYSYFDYW

SEQ ID NO: 2323 - protein, 16 aa, Artificial Sequence
  Description of Artificial Sequence: Synthetic peptide
CARSLGGSYFSGMDVW

SEQ ID NO: 2324 - protein, 16 aa, Artificial Sequence
  Description of Artificial Sequence: Synthetic peptide
CARSKGGSYYGPFDYW

SEQ ID NO: 2325 - protein, 16 aa, Artificial Sequence
  Description of Artificial Sequence: Synthetic peptide
CARPKGGNYWNAFDIW

SEQ ID NO: 2326 - protein, 16 aa, Artificial Sequence
  Description of Artificial Sequence: Synthetic peptide
CARPKSGSYVSYFDYW

SEQ ID NO: 2327 - protein, 16 aa, Artificial Sequence
  Description of Artificial Sequence: Synthetic peptide
CARPRGGNYLNYFDYW

SEQ ID NO: 2328 - protein, 13 aa, Artificial Sequence
  Description of Artificial Sequence: Synthetic peptide
CAKDHGDHYFDYW

SEQ ID NO: 2329 - protein, 16 aa, Artificial Sequence
  Description of Artificial Sequence: Synthetic peptide
CARDKGGSYYGPFDYW

SEQ ID NO: 2330 - protein, 16 aa, Artificial Sequence
  Description of Artificial Sequence: Synthetic peptide
CAKSGSGSYFSPFDYW

SEQ ID NO: 2331 - protein, 16 aa, Artificial Sequence
  Description of Artificial Sequence: Synthetic peptide
CARPRGGSYKDAFDIW

SEQ ID NO: 2332 - protein, 16 aa, Artificial Sequence
  Description of Artificial Sequence: Synthetic peptide
CARAHGGSYFSGMDVW

SEQ ID NO: 2333 - protein, 16 aa, Artificial Sequence
  Description of Artificial Sequence: Synthetic peptide
CARSKGGSYYGPFDDW

SEQ ID NO: 2334 - protein, 16 aa, Artificial Sequence
  Description of Artificial Sequence: Synthetic peptide
CARSRGGSYYAPFDYW

SEQ ID NO: 2335 - protein, 16 aa, Artificial Sequence
  Description of Artificial Sequence: Synthetic peptide
CARPLGGSYFAAFDIW

SEQ ID NO: 2336 - protein, 16 aa, Artificial Sequence
  Description of Artificial Sequence: Synthetic peptide
CAKTMSGSYFSAFDIW

SEQ ID NO: 2337 - protein, 16 aa, Artificial Sequence
  Description of Artificial Sequence: Synthetic peptide
CARPHGGNYFDWFDPW

SEQ ID NO: 2338 - protein, 16 aa, Artificial Sequence
  Description of Artificial Sequence: Synthetic peptide
CARPSGGSYFDPFDYW

SEQ ID NO: 2339 - protein, 16 aa, Artificial Sequence
  Description of Artificial Sequence: Synthetic peptide
CAKVDSGSYVGYFDYW

SEQ ID NO: 2340 - protein, 16 aa, Artificial Sequence
  Description of Artificial Sequence: Synthetic peptide
CARPNSGSYSNYFDYW

SEQ ID NO: 2341 - protein, 16 aa, Artificial Sequence
  Description of Artificial Sequence: Synthetic peptide
CARSRSGSYLAYFDYW

SEQ ID NO: 2342 - protein, 16 aa, Artificial Sequence
  Description of Artificial Sequence: Synthetic peptide
CARAAGGSYSSWFDPW

SEQ ID NO: 2343 - protein, 16 aa, Artificial Sequence
  Description of Artificial Sequence: Synthetic peptide
CARAHSGSYFSHFDYW

SEQ ID NO: 2344 - protein, 16 aa, Artificial Sequence
  Description of Artificial Sequence: Synthetic peptide
CARPTSGSYFSWFDPW

SEQ ID NO: 2345 - protein, 16 aa, Artificial Sequence
  Description of Artificial Sequence: Synthetic peptide
CARPNSGSYWGPFDYW

SEQ ID NO: 2346 - protein, 15 aa, Artificial Sequence
  Description of Artificial Sequence: Synthetic peptide
CARALGGNYYYFDYW

SEQ ID NO: 2347 - protein, 16 aa, Artificial Sequence
  Description of Artificial Sequence: Synthetic peptide
CARPRSGSYLSAFDYW

SEQ ID NO: 2348 - protein, 15 aa, Artificial Sequence
  Description of Artificial Sequence: Synthetic peptide
CAKGYGGNYYYMDGW

SEQ ID NO: 2349 - protein, 16 aa, Artificial Sequence
  Description of Artificial Sequence: Synthetic peptide
CARTYGGSYYSAFDYW

SEQ ID NO: 2350 - protein, 14 aa, Artificial Sequence
  Description of Artificial Sequence: Synthetic peptide
CARNLLRGYGMDVW

SEQ ID NO: 2351 - protein, 13 aa, Artificial Sequence
  Description of Artificial Sequence: Synthetic peptide
CATLGYGDYPDYW

SEQ ID NO: 2352 - protein, 16 aa, Artificial Sequence
  Description of Artificial Sequence: Synthetic peptide
CARPLGGGYQDAFDIW

SEQ ID NO: 2353 - protein, 12 aa, Artificial Sequence
  Description of Artificial Sequence: Synthetic peptide
CAKEDVGKPFYW

SEQ ID NO: 2354 - protein, 12 aa, Artificial Sequence
  Description of Artificial Sequence: Synthetic peptide
CAKEDVGKPFFW

SEQ ID NO: 2355 - protein, 12 aa, Artificial Sequence
  Description of Artificial Sequence: Synthetic peptide
CAKEDVGKPFDW

SEQ ID NO: 2356 - protein, 12 aa, Artificial Sequence
  Description of Artificial Sequence: Synthetic peptide
CAKEDVGKPFCW

SEQ ID NO: 2357 - protein, 12 aa, Artificial Sequence
  Description of Artificial Sequence: Synthetic peptide
CAKEDVGKPFDW

SEQ ID NO: 2358 - protein, 12 aa, Artificial Sequence
  Description of Artificial Sequence: Synthetic peptide
CAKEDVGKPFDW

SEQ ID NO: 2359 - protein, 12 aa, Artificial Sequence
  Description of Artificial Sequence: Synthetic peptide
CAKEDVGKPFDW

SEQ ID NO: 2360 - protein, 12 aa, Artificial Sequence
  Description of Artificial Sequence: Synthetic peptide
CAKEDVGKPLDW

SEQ ID NO: 2361 - protein, 12 aa, Artificial Sequence
  Description of Artificial Sequence: Synthetic peptide
CAKEDVGPPFDW

SEQ ID NO: 2362 - protein, 12 aa, Artificial Sequence
  Description of Artificial Sequence: Synthetic peptide
CAKEDVGKPFHW

SEQ ID NO: 2363 - protein, 12 aa, Artificial Sequence
  Description of Artificial Sequence: Synthetic peptide
CAKEDVGPPFYW

SEQ ID NO: 2364 - protein, 12 aa, Artificial Sequence
  Description of Artificial Sequence: Synthetic peptide
CWKEDVGKPGDW

SEQ ID NO: 2365 - protein, 12 aa, Artificial Sequence
  Description of Artificial Sequence: Synthetic peptide
CAKEDVGKPFCW

SEQ ID NO: 2366 - protein, 12 aa, Artificial Sequence
  Description of Artificial Sequence: Synthetic peptide
CRKEDVGKPFFW

SEQ ID NO: 2367 - protein, 12 aa, Artificial Sequence
  Description of Artificial Sequence: Synthetic peptide
CYKEDVGKPFYW

SEQ ID NO: 2368 - protein, 12 aa, Artificial Sequence
  Description of Artificial Sequence: Synthetic peptide
CHKEDVGKPFYW

SEQ ID NO: 2369 - protein, 12 aa, Artificial Sequence
  Description of Artificial Sequence: Synthetic peptide
CFKEDVGKPFFW

SEQ ID NO: 2370 - protein, 12 aa, Artificial Sequence
  Description of Artificial Sequence: Synthetic peptide
CYKEDVGKPFFW

SEQ ID NO: 2371 - protein, 12 aa, Artificial Sequence
  Description of Artificial Sequence: Synthetic peptide
CFKEDVGKPFWW

SEQ ID NO: 2372 - protein, 12 aa, Artificial Sequence
  Description of Artificial Sequence: Synthetic peptide
CWKEDVGKPFDE

SEQ ID NO: 2373 - protein, 11 aa, Artificial Sequence
  Description of Artificial Sequence: Synthetic peptide
CARVDRDFDYW

SEQ ID NO: 2374 - protein, 11 aa, Artificial Sequence
  Description of Artificial Sequence: Synthetic peptide
CARVDRDFDYW

SEQ ID NO: 2375 - protein, 11 aa, Artificial Sequence
  Description of Artificial Sequence: Synthetic peptide
CARVTRDFDYW

SEQ ID NO: 2376 - protein, 11 aa, Artificial Sequence
  Description of Artificial Sequence: Synthetic peptide
CARVWRDFDYW

SEQ ID NO: 2377 - protein, 11 aa, Artificial Sequence
  Description of Artificial Sequence: Synthetic peptide
CARVDRDFDYW

SEQ ID NO: 2378 - protein, 11 aa, Artificial Sequence
  Description of Artificial Sequence: Synthetic peptide
CARVDRDFDYW

SEQ ID NO: 2379 - protein, 11 aa, Artificial Sequence
  Description of Artificial Sequence: Synthetic peptide
CARVDRDFDYW

SEQ ID NO: 2380 - protein, 11 aa, Artificial Sequence
  Description of Artificial Sequence: Synthetic peptide
CARVDRDFDYW

SEQ ID NO: 2381 - protein, 11 aa, Artificial Sequence
  Description of Artificial Sequence: Synthetic peptide
CARVDRDFDYW

SEQ ID NO: 2382 - protein, 11 aa, Artificial Sequence
  Description of Artificial Sequence: Synthetic peptide
CARVYRDFDYW

SEQ ID NO: 2383 - protein, 11 aa, Artificial Sequence
  Description of Artificial Sequence: Synthetic peptide
CARVDRDFDYW

SEQ ID NO: 2384 - protein, 11 aa, Artificial Sequence
  Description of Artificial Sequence: Synthetic peptide
CARVTRDFDYW

SEQ ID NO: 2385 - protein, 11 aa, Artificial Sequence
  Description of Artificial Sequence: Synthetic peptide
CARVDRDFDYW

SEQ ID NO: 2386 - protein, 11 aa, Artificial Sequence
  Description of Artificial Sequence: Synthetic peptide
CARVDRDFDYW

SEQ ID NO: 2387 - protein, 11 aa, Artificial Sequence
  Description of Artificial Sequence: Synthetic peptide
CARVSRDFDYW

SEQ ID NO: 2388 - protein, 11 aa, Artificial Sequence
  Description of Artificial Sequence: Synthetic peptide
CARVDGDFDYW

SEQ ID NO: 2389 - protein, 11 aa, Artificial Sequence
  Description of Artificial Sequence: Synthetic peptide
CARVDRDFDYW

SEQ ID NO: 2390 - protein, 12 aa, Artificial Sequence
  Description of Artificial Sequence: Synthetic peptide
CWRLGNDYFDYW

SEQ ID NO: 2391 - protein, 12 aa, Artificial Sequence
  Description of Artificial Sequence: Synthetic peptide
CWRYGNDYFDYW

SEQ ID NO: 2392 - protein, 12 aa, Artificial Sequence
  Description of Artificial Sequence: Synthetic peptide
CWRLGNDYFDYW

SEQ ID NO: 2393 - protein, 12 aa, Artificial Sequence
  Description of Artificial Sequence: Synthetic peptide
CWRFGNDYFDYW

SEQ ID NO: 2394 - protein, 12 aa, Artificial Sequence
  Description of Artificial Sequence: Synthetic peptide
CPRLGNDYFDYW

SEQ ID NO: 2395 - protein, 12 aa, Artificial Sequence
  Description of Artificial Sequence: Synthetic peptide
CWRTGNDYFDYW

SEQ ID NO: 2396 - protein, 12 aa, Artificial Sequence
  Description of Artificial Sequence: Synthetic peptide
CWRHGNDYFDYW

SEQ ID NO: 2397 - protein, 14 aa, Artificial Sequence
  Description of Artificial Sequence: Synthetic peptide
CAGDYDFWSGFDHW

SEQ ID NO: 2398 - protein, 23 aa, Artificial Sequence
  Description of Artificial Sequence: Synthetic peptide
CARHYYDSSDYYPHYYYYGMDVW

SEQ ID NO: 2399 - protein, 20 aa, Artificial Sequence
  Description of Artificial Sequence: Synthetic peptide
CARHMGYYDSGTYFDYFDYW

SEQ ID NO: 2400 - protein, 11 aa, Artificial Sequence
  Description of Artificial Sequence: Synthetic peptide
CTTVDQYFDYW

SEQ ID NO: 2401 - protein, 13 aa, Artificial Sequence
  Description of Artificial Sequence: Synthetic peptide
CARYDFWSGYPYW

SEQ ID NO: 2402 - protein, 18 aa, Artificial Sequence
  Description of Artificial Sequence: Synthetic peptide
CAKFAVYDYWSGTSFDYW

SEQ ID NO: 2403 - protein, 15 aa, Artificial Sequence
  Description of Artificial Sequence: Synthetic peptide
CTSLVGLTAGFADYW

SEQ ID NO: 2404 - protein, 12 aa, Artificial Sequence
  Description of Artificial Sequence: Synthetic peptide
CAAFDGYTGSDW

SEQ ID NO: 2405 - protein, 14 aa, Artificial Sequence
  Description of Artificial Sequence: Synthetic peptide
CAGDYDFWSGFDHW

SEQ ID NO: 2406 - protein, 11 aa, Artificial Sequence
  Description of Artificial Sequence: Synthetic peptide
CARADNYFDYW

SEQ ID NO: 2407 - protein, 12 aa, Artificial Sequence
  Description of Artificial Sequence: Synthetic peptide
CAAFDGYTGSDW

SEQ ID NO: 2408 - protein, 14 aa, Artificial Sequence
  Description of Artificial Sequence: Synthetic peptide
CARDYGDYYYFDYW

SEQ ID NO: 2409 - protein, 14 aa, Artificial Sequence
  Description of Artificial Sequence: Synthetic peptide
CAKGPSSGYAFDIW

SEQ ID NO: 2410 - protein, 11 aa, Artificial Sequence
  Description of Artificial Sequence: Synthetic peptide
CTTVDQYFDYW

SEQ ID NO: 2411 - protein, 11 aa, Artificial Sequence
  Description of Artificial Sequence: Synthetic peptide
CTTVDQYFDYW

SEQ ID NO: 2412 - protein, 12 aa, Artificial Sequence
  Description of Artificial Sequence: Synthetic peptide
CAAFDGYSGSDW

SEQ ID NO: 2413 - protein, 14 aa, Artificial Sequence
  Description of Artificial Sequence: Synthetic peptide
CTTFNWNDEGFDYW

SEQ ID NO: 2414 - protein, 12 aa, Artificial Sequence
  Description of Artificial Sequence: Synthetic peptide
CAAFDGYTGSDW

SEQ ID NO: 2415 - protein, 12 aa, Artificial Sequence
  Description of Artificial Sequence: Synthetic peptide
CVRSNMAGFDHW

SEQ ID NO: 2416 - protein, 12 aa, Artificial Sequence
  Description of Artificial Sequence: Synthetic peptide
CAAFDGYSGSDW

SEQ ID NO: 2417 - protein, 11 aa, Artificial Sequence
  Description of Artificial Sequence: Synthetic peptide
RASQSIHRFLN

SEQ ID NO: 2418 - protein, 11 aa, Artificial Sequence
  Description of Artificial Sequence: Synthetic peptide
RASQTINTYLN

SEQ ID NO: 2419 - protein, 11 aa, Artificial Sequence
  Description of Artificial Sequence: Synthetic peptide
RASQNIHTYLN

SEQ ID NO: 2420 - protein, 11 aa, Artificial Sequence
  Description of Artificial Sequence: Synthetic peptide
RASQSIDTYLN

SEQ ID NO: 2421 - protein, 11 aa, Artificial Sequence
  Description of Artificial Sequence: Synthetic peptide
RASQSIHTYLN

SEQ ID NO: 2422 - protein, 11 aa, Artificial Sequence
  Description of Artificial Sequence: Synthetic peptide
RASQSIDTYLN

SEQ ID NO: 2423 - protein, 11 aa, Artificial Sequence
  Description of Artificial Sequence: Synthetic peptide
RASQSIDTYLN

SEQ ID NO: 2424 - protein, 11 aa, Artificial Sequence
  Description of Artificial Sequence: Synthetic peptide
RASQSIDTYLN

SEQ ID NO: 2425 - protein, 11 aa, Artificial Sequence
  Description of Artificial Sequence: Synthetic peptide
RASQRIGTYLN

SEQ ID NO: 2426 - protein, 11 aa, Artificial Sequence
  Description of Artificial Sequence: Synthetic peptide
RASQSIHISLN

SEQ ID NO: 2427 - protein, 11 aa, Artificial Sequence
  Description of Artificial Sequence: Synthetic peptide
RASQSIGNYLN

SEQ ID NO: 2428 - protein, 11 aa, Artificial Sequence
  Description of Artificial Sequence: Synthetic peptide
RASQSIDNYLN

SEQ ID NO: 2429 - protein, 11 aa, Artificial Sequence
  Description of Artificial Sequence: Synthetic peptide
RASQSIDTYLN

SEQ ID NO: 2430 - protein, 11 aa, Artificial Sequence
  Description of Artificial Sequence: Synthetic peptide
RASQSIDTYLN

SEQ ID NO: 2431 - protein, 11 aa, Artificial Sequence
  Description of Artificial Sequence: Synthetic peptide
RASQSIDNYLN

SEQ ID NO: 2432 - protein, 11 aa, Artificial Sequence
  Description of Artificial Sequence: Synthetic peptide
RASQTIYSYLN

SEQ ID NO: 2433 - protein, 11 aa, Artificial Sequence
  Description of Artificial Sequence: Synthetic peptide
RTSQSINTYLN

SEQ ID NO: 2434 - protein, 11 aa, Artificial Sequence
  Description of Artificial Sequence: Synthetic peptide
RASRSISRYLN

SEQ ID NO: 2435 - protein, 11 aa, Artificial Sequence
  Description of Artificial Sequence: Synthetic peptide
RASRSIRRYLN

SEQ ID NO: 2436 - protein, 11 aa, Artificial Sequence
  Description of Artificial Sequence: Synthetic peptide
RASQSIGRYLN

SEQ ID NO: 2437 - protein, 11 aa, Artificial Sequence
  Description of Artificial Sequence: Synthetic peptide
RASQSIGKYLN

SEQ ID NO: 2438 - protein, 11 aa, Artificial Sequence
  Description of Artificial Sequence: Synthetic peptide
RASQSIGRYLN

SEQ ID NO: 2439 - protein, 11 aa, Artificial Sequence
  Description of Artificial Sequence: Synthetic peptide
RASQSIGRYLN

SEQ ID NO: 2440 - protein, 11 aa, Artificial Sequence
  Description of Artificial Sequence: Synthetic peptide
RASQSIGRYLN

SEQ ID NO: 2441 - protein, 11 aa, Artificial Sequence
  Description of Artificial Sequence: Synthetic peptide
RASQSIRKYLN

SEQ ID NO: 2442 - protein, 11 aa, Artificial Sequence
  Description of Artificial Sequence: Synthetic peptide
RASQSIGKYLN

SEQ ID NO: 2443 - protein, 11 aa, Artificial Sequence
  Description of Artificial Sequence: Synthetic peptide
RASQSIGKYLN

SEQ ID NO: 2444 - protein, 11 aa, Artificial Sequence
  Description of Artificial Sequence: Synthetic peptide
RASQSIGKYLN

SEQ ID NO: 2445 - protein, 11 aa, Artificial Sequence
  Description of Artificial Sequence: Synthetic peptide
RASQSIGKYLN

SEQ ID NO: 2446 - protein, 11 aa, Artificial Sequence
  Description of Artificial Sequence: Synthetic peptide
RASQNIKTYLN

SEQ ID NO: 2447 - protein, 11 aa, Artificial Sequence
  Description of Artificial Sequence: Synthetic peptide
RASQSIHRFLN

SEQ ID NO: 2448 - protein, 11 aa, Artificial Sequence
  Description of Artificial Sequence: Synthetic peptide
RASQSIHISLN

SEQ ID NO: 2449 - protein, 11 aa, Artificial Sequence
  Description of Artificial Sequence: Synthetic peptide
RASQSIHTYLN

SEQ ID NO: 2450 - protein, 11 aa, Artificial Sequence
  Description of Artificial Sequence: Synthetic peptide
RASQTINTYLN

SEQ ID NO: 2451 - protein, 11 aa, Artificial Sequence
  Description of Artificial Sequence: Synthetic peptide
RASQSIDTYLN

SEQ ID NO: 2452 - protein, 11 aa, Artificial Sequence
  Description of Artificial Sequence: Synthetic peptide
RASQSIGNYLN

SEQ ID NO: 2453 - protein, 11 aa, Artificial Sequence
  Description of Artificial Sequence: Synthetic peptide
RASQSIDTYLN

SEQ ID NO: 2454 - protein, 11 aa, Artificial Sequence
  Description of Artificial Sequence: Synthetic peptide
RASQSIDNYLN

SEQ ID NO: 2455 - protein, 11 aa, Artificial Sequence
  Description of Artificial Sequence: Synthetic peptide
RASQSIDTYLN

SEQ ID NO: 2456 - protein, 11 aa, Artificial Sequence
  Description of Artificial Sequence: Synthetic peptide
RASQSIDTYLN

SEQ ID NO: 2457 - protein, 11 aa, Artificial Sequence
  Description of Artificial Sequence: Synthetic peptide
RASQSIDTYLN

SEQ ID NO: 2458 - protein, 11 aa, Artificial Sequence
  Description of Artificial Sequence: Synthetic peptide
RASQSIDTYLN

SEQ ID NO: 2459 - protein, 11 aa, Artificial Sequence
  Description of Artificial Sequence: Synthetic peptide
RASQSIDNYLN

SEQ ID NO: 2460 - protein, 11 aa, Artificial Sequence
  Description of Artificial Sequence: Synthetic peptide
RASQRIGTYLN

SEQ ID NO: 2461 - protein, 11 aa, Artificial Sequence
  Description of Artificial Sequence: Synthetic peptide
RASQSIHTYLN

SEQ ID NO: 2462 - protein, 11 aa, Artificial Sequence
  Description of Artificial Sequence: Synthetic peptide
RASQSIHTYLN

SEQ ID NO: 2463 - protein, 11 aa, Artificial Sequence
  Description of Artificial Sequence: Synthetic peptide
RASQTINTFLN

SEQ ID NO: 2464 - protein, 11 aa, Artificial Sequence
  Description of Artificial Sequence: Synthetic peptide
RASQTIRTYLN

SEQ ID NO: 2465 - protein, 11 aa, Artificial Sequence
  Description of Artificial Sequence: Synthetic peptide
RSSQSISSYLN

SEQ ID NO: 2466 - protein, 11 aa, Artificial Sequence
  Description of Artificial Sequence: Synthetic peptide
RASQSISGSLN

SEQ ID NO: 2467 - protein, 11 aa, Artificial Sequence
  Description of Artificial Sequence: Synthetic peptide
RASRSISTYLN

SEQ ID NO: 2468 - protein, 11 aa, Artificial Sequence
  Description of Artificial Sequence: Synthetic peptide
RASQSIHTYLN

SEQ ID NO: 2469 - protein, 11 aa, Artificial Sequence
  Description of Artificial Sequence: Synthetic peptide
RASQSIRKYLN

SEQ ID NO: 2470 - protein, 11 aa, Artificial Sequence
  Description of Artificial Sequence: Synthetic peptide
RASQNIKTYLN

SEQ ID NO: 2471 - protein, 11 aa, Artificial Sequence
  Description of Artificial Sequence: Synthetic peptide
RASQTIYSYLN

SEQ ID NO: 2472 - protein, 11 aa, Artificial Sequence
  Description of Artificial Sequence: Synthetic peptide
RASRSIRRYLN

SEQ ID NO: 2473 - protein, 11 aa, Artificial Sequence
  Description of Artificial Sequence: Synthetic peptide
RASQSIGKYLN

SEQ ID NO: 2474 - protein, 11 aa, Artificial Sequence
  Description of Artificial Sequence: Synthetic peptide
RASRSISRYLN

SEQ ID NO: 2475 - protein, 11 aa, Artificial Sequence
  Description of Artificial Sequence: Synthetic peptide
RASQSIGKYLN

SEQ ID NO: 2476 - protein, 11 aa, Artificial Sequence
  Description of Artificial Sequence: Synthetic peptide
RASQSIGRYLN

SEQ ID NO: 2477 - protein, 11 aa, Artificial Sequence
  Description of Artificial Sequence: Synthetic peptide
RASQSIGRYLN

SEQ ID NO: 2478 - protein, 11 aa, Artificial Sequence
  Description of Artificial Sequence: Synthetic peptide
RASQSIGKYLN

SEQ ID NO: 2479 - protein, 11 aa, Artificial Sequence
  Description of Artificial Sequence: Synthetic peptide
RASQSIGRYLN

SEQ ID NO: 2480 - protein, 11 aa, Artificial Sequence
  Description of Artificial Sequence: Synthetic peptide
RTSQSINTYLN

SEQ ID NO: 2481 - protein, 11 aa, Artificial Sequence
  Description of Artificial Sequence: Synthetic peptide
RASQSIGKYLN

SEQ ID NO: 2482 - protein, 11 aa, Artificial Sequence
  Description of Artificial Sequence: Synthetic peptide
RASQSIGKYLN

SEQ ID NO: 2483 - protein, 11 aa, Artificial Sequence
  Description of Artificial Sequence: Synthetic peptide
RASQSIGRYLN

SEQ ID NO: 2484 - protein, 11 aa, Artificial Sequence
  Description of Artificial Sequence: Synthetic peptide
RASQIIGSYLN

SEQ ID NO: 2485 - protein, 11 aa, Artificial Sequence
  Description of Artificial Sequence: Synthetic peptide
RASQSISRYIN

SEQ ID NO: 2486 - protein, 11 aa, Artificial Sequence
  Description of Artificial Sequence: Synthetic peptide
RASQSIYTYLN

SEQ ID NO: 2487 - protein, 11 aa, Artificial Sequence
  Description of Artificial Sequence: Synthetic peptide
RASQSIATYLN

SEQ ID NO: 2488 - protein, 11 aa, Artificial Sequence
  Description of Artificial Sequence: Synthetic peptide
RASQNINTYLN

SEQ ID NO: 2489 - protein, 11 aa, Artificial Sequence
  Description of Artificial Sequence: Synthetic peptide
RASQGIATYLN

SEQ ID NO: 2490 - protein, 11 aa, Artificial Sequence
  Description of Artificial Sequence: Synthetic peptide
RASERISNYLN

SEQ ID NO: 2491 - protein, 11 aa, Artificial Sequence
  Description of Artificial Sequence: Synthetic peptide
RASQSISSSLN

SEQ ID NO: 2492 - protein, 11 aa, Artificial Sequence
  Description of Artificial Sequence: Synthetic peptide
RASQSISSHLN

SEQ ID NO: 2493 - protein, 11 aa, Artificial Sequence
  Description of Artificial Sequence: Synthetic peptide
RASQSISSYLI

SEQ ID NO: 2494 - protein, 11 aa, Artificial Sequence
  Description of Artificial Sequence: Synthetic peptide
RASPSISTYLN

SEQ ID NO: 2495 - protein, 11 aa, Artificial Sequence
  Description of Artificial Sequence: Synthetic peptide
RASQNIAKYLN

SEQ ID NO: 2496 - protein, 11 aa, Artificial Sequence
  Description of Artificial Sequence: Synthetic peptide
RASQSIGTYLN

SEQ ID NO: 2497 - protein, 11 aa, Artificial Sequence
  Description of Artificial Sequence: Synthetic peptide
RASQSISPYLN

SEQ ID NO: 2498 - protein, 11 aa, Artificial Sequence
  Description of Artificial Sequence: Synthetic peptide
RASQGVSNYLA

SEQ ID NO: 2499 - protein, 11 aa, Artificial Sequence
  Description of Artificial Sequence: Synthetic peptide
RASQSVSSSLA

SEQ ID NO: 2500 - protein, 11 aa, Artificial Sequence
  Description of Artificial Sequence: Synthetic peptide
RASQSVNSYLA

SEQ ID NO: 2501 - protein, 11 aa, Artificial Sequence
  Description of Artificial Sequence: Synthetic peptide
RASQSVGTSLA

SEQ ID NO: 2502 - protein, 11 aa, Artificial Sequence
  Description of Artificial Sequence: Synthetic peptide
RATQYVNSYLA

SEQ ID NO: 2503 - protein, 11 aa, Artificial Sequence
  Description of Artificial Sequence: Synthetic peptide
RASQSVGTSLA

SEQ ID NO: 2504 - protein, 11 aa, Artificial Sequence
  Description of Artificial Sequence: Synthetic peptide
RASQGVSNYLA

SEQ ID NO: 2505 - protein, 11 aa, Artificial Sequence
  Description of Artificial Sequence: Synthetic peptide
RASQGVSNYLA

SEQ ID NO: 2506 - protein, 11 aa, Artificial Sequence
  Description of Artificial Sequence: Synthetic peptide
RASQSVDSRLA

SEQ ID NO: 2507 - protein, 11 aa, Artificial Sequence
  Description of Artificial Sequence: Synthetic peptide
RASQSVRHHLA

SEQ ID NO: 2508 - protein, 11 aa, Artificial Sequence
  Description of Artificial Sequence: Synthetic peptide
RASQSVGNFLA

SEQ ID NO: 2509 - protein, 11 aa, Artificial Sequence
  Description of Artificial Sequence: Synthetic peptide
RASESISTYLA

SEQ ID NO: 2510 - protein, 11 aa, Artificial Sequence
  Description of Artificial Sequence: Synthetic peptide
RASQSVGDFLA

SEQ ID NO: 2511 - protein, 11 aa, Artificial Sequence
  Description of Artificial Sequence: Synthetic peptide
RASQTIRNSLN

SEQ ID NO: 2512 - protein, 11 aa, Artificial Sequence
  Description of Artificial Sequence: Synthetic peptide
RASQSVSSSLA

SEQ ID NO: 2513 - protein, 11 aa, Artificial Sequence
  Description of Artificial Sequence: Synthetic peptide
RASQDVSTYLA

SEQ ID NO: 2514 - protein, 11 aa, Artificial Sequence
  Description of Artificial Sequence: Synthetic peptide
RASQDVSTYLA

SEQ ID NO: 2515 - protein, 11 aa, Artificial Sequence
  Description of Artificial Sequence: Synthetic peptide
RASQDVSTYLA

SEQ ID NO: 2516 - protein, 11 aa, Artificial Sequence
  Description of Artificial Sequence: Synthetic peptide
RASQDVSTYLA

SEQ ID NO: 2517 - protein, 11 aa, Artificial Sequence
  Description of Artificial Sequence: Synthetic peptide
RASQDVSTYLA

SEQ ID NO: 2518 - protein, 11 aa, Artificial Sequence
  Description of Artificial Sequence: Synthetic peptide
RASQDVSTYLA

SEQ ID NO: 2519 - protein, 11 aa, Artificial Sequence
  Description of Artificial Sequence: Synthetic peptide
RASQSLGSFLA

SEQ ID NO: 2520 - protein, 11 aa, Artificial Sequence
  Description of Artificial Sequence: Synthetic peptide
RASQSVNSYLA

SEQ ID NO: 2521 - protein, 11 aa, Artificial Sequence
  Description of Artificial Sequence: Synthetic peptide
RASQNIGNHLA

SEQ ID NO: 2522 - protein, 11 aa, Artificial Sequence
  Description of Artificial Sequence: Synthetic peptide
RASQSVGSYLA

SEQ ID NO: 2523 - protein, 11 aa, Artificial Sequence
  Description of Artificial Sequence: Synthetic peptide
RASQSITDYLA

SEQ ID NO: 2524 - protein, 11 aa, Artificial Sequence
  Description of Artificial Sequence: Synthetic peptide
RASQSVDSSLA

SEQ ID NO: 2525 - protein, 11 aa, Artificial Sequence
  Description of Artificial Sequence: Synthetic peptide
RASQSIGSYLA

SEQ ID NO: 2526 - protein, 11 aa, Artificial Sequence
  Description of Artificial Sequence: Synthetic peptide
RASQTVTNYLA

SEQ ID NO: 2527 - protein, 11 aa, Artificial Sequence
  Description of Artificial Sequence: Synthetic peptide
RASQSVSYYLA

SEQ ID NO: 2528 - protein, 11 aa, Artificial Sequence
  Description of Artificial Sequence: Synthetic peptide
RASQSVSTSLA

SEQ ID NO: 2529 - protein, 11 aa, Artificial Sequence
  Description of Artificial Sequence: Synthetic peptide
RASHNINNFLA

SEQ ID NO: 2530 - protein, 11 aa, Artificial Sequence
  Description of Artificial Sequence: Synthetic peptide
RASQSVGTSLA

SEQ ID NO: 2531 - protein, 11 aa, Artificial Sequence
  Description of Artificial Sequence: Synthetic peptide
RASQSVSSQLA

SEQ ID NO: 2532 - protein, 11 aa, Artificial Sequence
  Description of Artificial Sequence: Synthetic peptide
RASQSVDSRLA

SEQ ID NO: 2533 - protein, 11 aa, Artificial Sequence
  Description of Artificial Sequence: Synthetic peptide
RASQSVGSYLA

SEQ ID NO: 2534 - skipped

SEQ ID NO: 2535 - protein, 11 aa, Artificial Sequence
  Description of Artificial Sequence: Synthetic peptide
RASQNIGSHLA

SEQ ID NO: 2536 - protein, 11 aa, Artificial Sequence
  Description of Artificial Sequence: Synthetic peptide
RASQSLTSYLA

SEQ ID NO: 2537 - protein, 11 aa, Artificial Sequence
  Description of Artificial Sequence: Synthetic peptide
RASQSIGSYLA

SEQ ID NO: 2538 - protein, 11 aa, Artificial Sequence
  Description of Artificial Sequence: Synthetic peptide
RASQSVGSYLA

SEQ ID NO: 2539 - protein, 11 aa, Artificial Sequence
  Description of Artificial Sequence: Synthetic peptide
RASQSVSSHLA

SEQ ID NO: 2540 - protein, 11 aa, Artificial Sequence
  Description of Artificial Sequence: Synthetic peptide
RASQSVDSRLA

SEQ ID NO: 2541 - protein, 11 aa, Artificial Sequence
  Description of Artificial Sequence: Synthetic peptide
RASQSVGDFLA

SEQ ID NO: 2542 - protein, 11 aa, Artificial Sequence
  Description of Artificial Sequence: Synthetic peptide
RASQSVGSHLA

SEQ ID NO: 2543 - protein, 11 aa, Artificial Sequence
  Description of Artificial Sequence: Synthetic peptide
RASQNVGQSLA

SEQ ID NO: 2544 - protein, 11 aa, Artificial Sequence
  Description of Artificial Sequence: Synthetic peptide
RASQSLGNYLA

SEQ ID NO: 2545 - protein, 11 aa, Artificial Sequence
  Description of Artificial Sequence: Synthetic peptide
RASQSLGNYLA

SEQ ID NO: 2546 - protein, 11 aa, Artificial Sequence
  Description of Artificial Sequence: Synthetic peptide
RASQNIGNHLA

SEQ ID NO: 2547 - protein, 11 aa, Artificial Sequence
  Description of Artificial Sequence: Synthetic peptide
RASQSVSTSLA

SEQ ID NO: 2548 - protein, 11 aa, Artificial Sequence
  Description of Artificial Sequence: Synthetic peptide
RASQSVNSDLA

SEQ ID NO: 2549 - protein, 11 aa, Artificial Sequence
  Description of Artificial Sequence: Synthetic peptide
RASQSVGSYLA

SEQ ID NO: 2550 - protein, 11 aa, Artificial Sequence
  Description of Artificial Sequence: Synthetic peptide
RASQSVSSSLA

SEQ ID NO: 2551 - protein, 11 aa, Artificial Sequence
  Description of Artificial Sequence: Synthetic peptide
RASQSVGSYLA

SEQ ID NO: 2552 - protein, 11 aa, Artificial Sequence
  Description of Artificial Sequence: Synthetic peptide
RASQSVGSYLA

SEQ ID NO: 2553 - protein, 11 aa, Artificial Sequence
  Description of Artificial Sequence: Synthetic peptide
RASQSVSSHLA

SEQ ID NO: 2554 - protein, 11 aa, Artificial Sequence
  Description of Artificial Sequence: Synthetic peptide
RASQSLDSYLA

SEQ ID NO: 2555 - protein, 11 aa, Artificial Sequence
  Description of Artificial Sequence: Synthetic peptide
RASQSVSKFLA

SEQ ID NO: 2556 - protein, 11 aa, Artificial Sequence
  Description of Artificial Sequence: Synthetic peptide
RASQSIGGSLA

SEQ ID NO: 2557 - protein, 11 aa, Artificial Sequence
  Description of Artificial Sequence: Synthetic peptide
RASQSISRYLA

SEQ ID NO: 2558 - protein, 11 aa, Artificial Sequence
  Description of Artificial Sequence: Synthetic peptide
RASQSLGNYLA

SEQ ID NO: 2559 - protein, 11 aa, Artificial Sequence
  Description of Artificial Sequence: Synthetic peptide
RASQSVNSDLA

SEQ ID NO: 2560 - protein, 11 aa, Artificial Sequence
  Description of Artificial Sequence: Synthetic peptide
RASQSVRHHLA

SEQ ID NO: 2561 - protein, 11 aa, Artificial Sequence
  Description of Artificial Sequence: Synthetic peptide
RASQSVDSRLA

SEQ ID NO: 2562 - protein, 11 aa, Artificial Sequence
  Description of Artificial Sequence: Synthetic peptide
RASQSFGDSLA

SEQ ID NO: 2563 - protein, 11 aa, Artificial Sequence
  Description of Artificial Sequence: Synthetic peptide
RASQSVNSYLA

SEQ ID NO: 2564 - protein, 11 aa, Artificial Sequence
  Description of Artificial Sequence: Synthetic peptide
RASQSVSTSLA

SEQ ID NO: 2565 - protein, 11 aa, Artificial Sequence
  Description of Artificial Sequence: Synthetic peptide
RASDTVSSYLA

SEQ ID NO: 2566 - protein, 11 aa, Artificial Sequence
  Description of Artificial Sequence: Synthetic peptide
RASQSVRHHLA

SEQ ID NO: 2567 - protein, 11 aa, Artificial Sequence
  Description of Artificial Sequence: Synthetic peptide
RASQIISSYLA

SEQ ID NO: 2568 - protein, 11 aa, Artificial Sequence
  Description of Artificial Sequence: Synthetic peptide
RASHNIGTYLA

SEQ ID NO: 2569 - skipped

SEQ ID NO: 2570 - protein, 11 aa, Artificial Sequence
  Description of Artificial Sequence: Synthetic peptide
RASQSIGSYLA

SEQ ID NO: 2571 - protein, 11 aa, Artificial Sequence
  Description of Artificial Sequence: Synthetic peptide
RASQDVSTYLA

SEQ ID NO: 2572 - protein, 11 aa, Artificial Sequence
  Description of Artificial Sequence: Synthetic peptide
RASQSVGNFLA

SEQ ID NO: 2573 - protein, 11 aa, Artificial Sequence
  Description of Artificial Sequence: Synthetic peptide
RASQRVSSYLA

SEQ ID NO: 2574 - protein, 11 aa, Artificial Sequence
  Description of Artificial Sequence: Synthetic peptide
RASQGISTYLA

SEQ ID NO: 2575 - protein, 11 aa, Artificial Sequence
  Description of Artificial Sequence: Synthetic peptide
RASESVSESLA

SEQ ID NO: 2576 - protein, 11 aa, Artificial Sequence
  Description of Artificial Sequence: Synthetic peptide
RASQSVSTSLA

SEQ ID NO: 2577 - protein, 11 aa, Artificial Sequence
  Description of Artificial Sequence: Synthetic peptide
RASESISTYLA

SEQ ID NO: 2578 - protein, 11 aa, Artificial Sequence
  Description of Artificial Sequence: Synthetic peptide
RASQSVNSDLA

SEQ ID NO: 2579 - protein, 11 aa, Artificial Sequence
  Description of Artificial Sequence: Synthetic peptide
RASQNVGQSLA

SEQ ID NO: 2580 - protein, 11 aa, Artificial Sequence
  Description of Artificial Sequence: Synthetic peptide
RASQSVDSRLA

SEQ ID NO: 2581 - protein, 11 aa, Artificial Sequence
  Description of Artificial Sequence: Synthetic peptide
RASQSVGKSLA

SEQ ID NO: 2582 - protein, 11 aa, Artificial Sequence
  Description of Artificial Sequence: Synthetic peptide
RASQSVGDFLA

SEQ ID NO: 2583 - protein, 11 aa, Artificial Sequence
  Description of Artificial Sequence: Synthetic peptide
RASDTVSSYLA

SEQ ID NO: 2584 - protein, 11 aa, Artificial Sequence
  Description of Artificial Sequence: Synthetic peptide
RASQSIGDYLN

SEQ ID NO: 2585 - protein, 11 aa, Artificial Sequence
  Description of Artificial Sequence: Synthetic peptide
RASQSITRYLN

SEQ ID NO: 2586 - protein, 11 aa, Artificial Sequence
  Description of Artificial Sequence: Synthetic peptide
RASQSIGSYLA

SEQ ID NO: 2587 - protein, 7 aa, Artificial Sequence
  Description of Artificial Sequence: Synthetic peptide
AASNLHS

SEQ ID NO: 2588 - protein, 7 aa, Artificial Sequence
  Description of Artificial Sequence: Synthetic peptide
SASTLQS

SEQ ID NO: 2589 - protein, 7 aa, Artificial Sequence
  Description of Artificial Sequence: Synthetic peptide
AASTFAK

SEQ ID NO: 2590 - protein, 7 aa, Artificial Sequence
  Description of Artificial Sequence: Synthetic peptide
AASALAS

SEQ ID NO: 2591 - protein, 7 aa, Artificial Sequence
  Description of Artificial Sequence: Synthetic peptide
AASALAS

SEQ ID NO: 2592 - protein, 7 aa, Artificial Sequence
  Description of Artificial Sequence: Synthetic peptide
AASALAS

SEQ ID NO: 2593 - protein, 7 aa, Artificial Sequence
  Description of Artificial Sequence: Synthetic peptide
AASALAS

SEQ ID NO: 2594 - protein, 7 aa, Artificial Sequence
  Description of Artificial Sequence: Synthetic peptide
AASALAS

SEQ ID NO: 2595 - protein, 7 aa, Artificial Sequence
  Description of Artificial Sequence: Synthetic peptide
AASNLEG

SEQ ID NO: 2596 - protein, 7 aa, Artificial Sequence
  Description of Artificial Sequence: Synthetic peptide
LASPLAS

SEQ ID NO: 2597 - protein, 7 aa, Artificial Sequence
  Description of Artificial Sequence: Synthetic peptide
GVSSLQS

SEQ ID NO: 2598 - protein, 7 aa, Artificial Sequence
  Description of Artificial Sequence: Synthetic peptide
GVSALQS

SEQ ID NO: 2599 - protein, 7 aa, Artificial Sequence
  Description of Artificial Sequence: Synthetic peptide
GASALES

SEQ ID NO: 2600 - protein, 7 aa, Artificial Sequence
  Description of Artificial Sequence: Synthetic peptide
GVSALQS

SEQ ID NO: 2601 - protein, 7 aa, Artificial Sequence
  Description of Artificial Sequence: Synthetic peptide
GVSALQS

SEQ ID NO: 2602 - protein, 7 aa, Artificial Sequence
  Description of Artificial Sequence: Synthetic peptide
ATSTLQG

SEQ ID NO: 2603 - protein, 7 aa, Artificial Sequence
  Description of Artificial Sequence: Synthetic peptide
GASNVQS

SEQ ID NO: 2604 - protein, 7 aa, Artificial Sequence
  Description of Artificial Sequence: Synthetic peptide
AASSLQA

SEQ ID NO: 2605 - protein, 7 aa, Artificial Sequence
  Description of Artificial Sequence: Synthetic peptide
ASSSLQA

SEQ ID NO: 2606 - protein, 7 aa, Artificial Sequence
  Description of Artificial Sequence: Synthetic peptide
AASSLKS

SEQ ID NO: 2607 - protein, 7 aa, Artificial Sequence
  Description of Artificial Sequence: Synthetic peptide
ASSSLQS

SEQ ID NO: 2608 - protein, 7 aa, Artificial Sequence
  Description of Artificial Sequence: Synthetic peptide
ASSSLQS

SEQ ID NO: 2609 - protein, 7 aa, Artificial Sequence
  Description of Artificial Sequence: Synthetic peptide
AASSLKS

SEQ ID NO: 2610 - protein, 7 aa, Artificial Sequence
  Description of Artificial Sequence: Synthetic peptide
AASSLKS

SEQ ID NO: 2611 - protein, 7 aa, Artificial Sequence
  Description of Artificial Sequence: Synthetic peptide
ASSTLQR

SEQ ID NO: 2612 - protein, 7 aa, Artificial Sequence
  Description of Artificial Sequence: Synthetic peptide
ASSTLQR

SEQ ID NO: 2613 - protein, 7 aa, Artificial Sequence
  Description of Artificial Sequence: Synthetic peptide
ASSTLQR

SEQ ID NO: 2614 - protein, 7 aa, Artificial Sequence
  Description of Artificial Sequence: Synthetic peptide
ASSTLQR

SEQ ID NO: 2615 - protein, 7 aa, Artificial Sequence
  Description of Artificial Sequence: Synthetic peptide
ASSTLQR

SEQ ID NO: 2616 - protein, 7 aa, Artificial Sequence
  Description of Artificial Sequence: Synthetic peptide
AASKLQS

SEQ ID NO: 2617 - protein, 7 aa, Artificial Sequence
  Description of Artificial Sequence: Synthetic peptide
AASNLHS

SEQ ID NO: 2618 - protein, 7 aa, Artificial Sequence
  Description of Artificial Sequence: Synthetic peptide
LASPLAS

SEQ ID NO: 2619 - protein, 7 aa, Artificial Sequence
  Description of Artificial Sequence: Synthetic peptide
AASALAS

SEQ ID NO: 2620 - protein, 7 aa, Artificial Sequence
  Description of Artificial Sequence: Synthetic peptide
SASTLQS

SEQ ID NO: 2621 - protein, 7 aa, Artificial Sequence
  Description of Artificial Sequence: Synthetic peptide
AASALAS

SEQ ID NO: 2622 - protein, 7 aa, Artificial Sequence
  Description of Artificial Sequence: Synthetic peptide
GVSSLQS

SEQ ID NO: 2623 - protein, 7 aa, Artificial Sequence
  Description of Artificial Sequence: Synthetic peptide
AASALAS

SEQ ID NO: 2624 - protein, 7 aa, Artificial Sequence
  Description of Artificial Sequence: Synthetic peptide
GVSALQS

SEQ ID NO: 2625 - protein, 7 aa, Artificial Sequence
  Description of Artificial Sequence: Synthetic peptide
GASALES

SEQ ID NO: 2626 - protein, 7 aa, Artificial Sequence
  Description of Artificial Sequence: Synthetic peptide
AASALAS

SEQ ID NO: 2627 - protein, 7 aa, Artificial Sequence
  Description of Artificial Sequence: Synthetic peptide
GVSALQS

SEQ ID NO: 2628 - protein, 7 aa, Artificial Sequence
  Description of Artificial Sequence: Synthetic peptide
AASALAS

SEQ ID NO: 2629 - protein, 7 aa, Artificial Sequence
  Description of Artificial Sequence: Synthetic peptide
GVSALQS

SEQ ID NO: 2630 - protein, 7 aa, Artificial Sequence
  Description of Artificial Sequence: Synthetic peptide
AASNLEG

SEQ ID NO: 2631 - protein, 7 aa, Artificial Sequence
  Description of Artificial Sequence: Synthetic peptide
AASALAS

SEQ ID NO: 2632 - protein, 7 aa, Artificial Sequence
  Description of Artificial Sequence: Synthetic peptide
AASALAS

SEQ ID NO: 2633 - protein, 7 aa, Artificial Sequence
  Description of Artificial Sequence: Synthetic peptide
SASTLQS

SEQ ID NO: 2634 - protein, 7 aa, Artificial Sequence
  Description of Artificial Sequence: Synthetic peptide
DASTLQR

SEQ ID NO: 2635 - protein, 7 aa, Artificial Sequence
  Description of Artificial Sequence: Synthetic peptide
GASRLRS

SEQ ID NO: 2636 - protein, 7 aa, Artificial Sequence
  Description of Artificial Sequence: Synthetic peptide
AESRLHS

SEQ ID NO: 2637 - protein, 7 aa, Artificial Sequence
  Description of Artificial Sequence: Synthetic peptide
AASNLQG

SEQ ID NO: 2638 - protein, 7 aa, Artificial Sequence
  Description of Artificial Sequence: Synthetic peptide
AASALAS

SEQ ID NO: 2639 - protein, 7 aa, Artificial Sequence
  Description of Artificial Sequence: Synthetic peptide
ASSTLQR

SEQ ID NO: 2640 - protein, 7 aa, Artificial Sequence
  Description of Artificial Sequence: Synthetic peptide
AASKLQS

SEQ ID NO: 2641 - protein, 7 aa, Artificial Sequence
  Description of Artificial Sequence: Synthetic peptide
ATSTLQG

SEQ ID NO: 2642 - protein, 7 aa, Artificial Sequence
  Description of Artificial Sequence: Synthetic peptide
ASSSLQA

SEQ ID NO: 2643 - protein, 7 aa, Artificial Sequence
  Description of Artificial Sequence: Synthetic peptide
ASSSLQS

SEQ ID NO: 2644 - protein, 7 aa, Artificial Sequence
  Description of Artificial Sequence: Synthetic peptide
AASSLQA

SEQ ID NO: 2645 - protein, 7 aa, Artificial Sequence
  Description of Artificial Sequence: Synthetic peptide
ASSTLQR

SEQ ID NO: 2646 - protein, 7 aa, Artificial Sequence
  Description of Artificial Sequence: Synthetic peptide
ASSSLQS

SEQ ID NO: 2647 - protein, 7 aa, Artificial Sequence
  Description of Artificial Sequence: Synthetic peptide
AASSLKS

SEQ ID NO: 2648 - protein, 7 aa, Artificial Sequence
  Description of Artificial Sequence: Synthetic peptide
ASSTLQR

SEQ ID NO: 2649 - protein, 7 aa, Artificial Sequence
  Description of Artificial Sequence: Synthetic peptide
AASSLKS

SEQ ID NO: 2650 - protein, 7 aa, Artificial Sequence
  Description of Artificial Sequence: Synthetic peptide
GASNVQS

SEQ ID NO: 2651 - protein, 7 aa, Artificial Sequence
  Description of Artificial Sequence: Synthetic peptide
ASSTLQR

SEQ ID NO: 2652 - protein, 7 aa, Artificial Sequence
  Description of Artificial Sequence: Synthetic peptide
ASSTLQR

SEQ ID NO: 2653 - protein, 7 aa, Artificial Sequence
  Description of Artificial Sequence: Synthetic peptide
AASSLKS

SEQ ID NO: 2654 - protein, 7 aa, Artificial Sequence
  Description of Artificial Sequence: Synthetic peptide
TTSNLQS

SEQ ID NO: 2655 - protein, 7 aa, Artificial Sequence
  Description of Artificial Sequence: Synthetic peptide
EASSLES

SEQ ID NO: 2656 - protein, 7 aa, Artificial Sequence
  Description of Artificial Sequence: Synthetic peptide
SASNLHS

SEQ ID NO: 2657 - protein, 7 aa, Artificial Sequence
  Description of Artificial Sequence: Synthetic peptide
GASSLEG

SEQ ID NO: 2658 - protein, 7 aa, Artificial Sequence
  Description of Artificial Sequence: Synthetic peptide
SASSLQS

SEQ ID NO: 2659 - protein, 7 aa, Artificial Sequence
  Description of Artificial Sequence: Synthetic peptide
YASNLQS

SEQ ID NO: 2660 - protein, 7 aa, Artificial Sequence
  Description of Artificial Sequence: Synthetic peptide
TASNLES

SEQ ID NO: 2661 - protein, 7 aa, Artificial Sequence
  Description of Artificial Sequence: Synthetic peptide
AASRLQD

SEQ ID NO: 2662 - protein, 7 aa, Artificial Sequence
  Description of Artificial Sequence: Synthetic peptide
RASTLQS

SEQ ID NO: 2663 - protein, 7 aa, Artificial Sequence
  Description of Artificial Sequence: Synthetic peptide
AASRLHS

SEQ ID NO: 2664 - protein, 7 aa, Artificial Sequence
  Description of Artificial Sequence: Synthetic peptide
TASRLQT

SEQ ID NO: 2665 - protein, 7 aa, Artificial Sequence
  Description of Artificial Sequence: Synthetic peptide
GASGLQS

SEQ ID NO: 2666 - protein, 7 aa, Artificial Sequence
  Description of Artificial Sequence: Synthetic peptide
AASNLHS

SEQ ID NO: 2667 - protein, 7 aa, Artificial Sequence
  Description of Artificial Sequence: Synthetic peptide
KASSLQS

SEQ ID NO: 2668 - protein, 7 aa, Artificial Sequence
  Description of Artificial Sequence: Synthetic peptide
DASNRAT

SEQ ID NO: 2669 - protein, 7 aa, Artificial Sequence
  Description of Artificial Sequence: Synthetic peptide
DASNRAT

SEQ ID NO: 2670 - protein, 7 aa, Artificial Sequence
  Description of Artificial Sequence: Synthetic peptide
DVSNRAT

SEQ ID NO: 2671 - protein, 7 aa, Artificial Sequence
  Description of Artificial Sequence: Synthetic peptide
GASNRAT

SEQ ID NO: 2672 - protein, 7 aa, Artificial Sequence
  Description of Artificial Sequence: Synthetic peptide
DVSNRAT

SEQ ID NO: 2673 - protein, 7 aa, Artificial Sequence
  Description of Artificial Sequence: Synthetic peptide
GASNRAT

SEQ ID NO: 2674 - protein, 7 aa, Artificial Sequence
  Description of Artificial Sequence: Synthetic peptide
DASNRAT

SEQ ID NO: 2675 - protein, 7 aa, Artificial Sequence
  Description of Artificial Sequence: Synthetic peptide
DASNRAT

SEQ ID NO: 2676 - protein, 7 aa, Artificial Sequence
  Description of Artificial Sequence: Synthetic peptide
DTSNRAT

SEQ ID NO: 2677 - protein, 7 aa, Artificial Sequence
  Description of Artificial Sequence: Synthetic peptide
DASNRAT

SEQ ID NO: 2678 - protein, 7 aa, Artificial Sequence
  Description of Artificial Sequence: Synthetic peptide
DASNRAT

SEQ ID NO: 2679 - protein, 7 aa, Artificial Sequence
  Description of Artificial Sequence: Synthetic peptide
DASNRAT

SEQ ID NO: 2680 - protein, 7 aa, Artificial Sequence
  Description of Artificial Sequence: Synthetic peptide
DTSNRAT

SEQ ID NO: 2681 - protein, 7 aa, Artificial Sequence
  Description of Artificial Sequence: Synthetic peptide
ASSSLQS

SEQ ID NO: 2682 - protein, 7 aa, Artificial Sequence
  Description of Artificial Sequence: Synthetic peptide
DASNRAT

SEQ ID NO: 2683 - protein, 7 aa, Artificial Sequence
  Description of Artificial Sequence: Synthetic peptide
DASNRAT

SEQ ID NO: 2684 - protein, 7 aa, Artificial Sequence
  Description of Artificial Sequence: Synthetic peptide
DASNRAT

SEQ ID NO: 2685 - protein, 7 aa, Artificial Sequence
  Description of Artificial Sequence: Synthetic peptide
DASNRAT

SEQ ID NO: 2686 - protein, 7 aa, Artificial Sequence
  Description of Artificial Sequence: Synthetic peptide
DASNRAT

SEQ ID NO: 2687 - protein, 7 aa, Artificial Sequence
  Description of Artificial Sequence: Synthetic peptide
DASNRAT

SEQ ID NO: 2688 - protein, 7 aa, Artificial Sequence
  Description of Artificial Sequence: Synthetic peptide
DASNRAT

SEQ ID NO: 2689 - protein, 7 aa, Artificial Sequence
  Description of Artificial Sequence: Synthetic peptide
DASNRAT

SEQ ID NO: 2690 - protein, 7 aa, Artificial Sequence
  Description of Artificial Sequence: Synthetic peptide
DVSNRAT

SEQ ID NO: 2691 - protein, 7 aa, Artificial Sequence
  Description of Artificial Sequence: Synthetic peptide
DASNRAT

SEQ ID NO: 2692 - protein, 7 aa, Artificial Sequence
  Description of Artificial Sequence: Synthetic peptide
DAVNRAT

SEQ ID NO: 2693 - protein, 7 aa, Artificial Sequence
  Description of Artificial Sequence: Synthetic peptide
DASNRAT

SEQ ID NO: 2694 - protein, 7 aa, Artificial Sequence
  Description of Artificial Sequence: Synthetic peptide
DASNRAT

SEQ ID NO: 2695 - protein, 7 aa, Artificial Sequence
  Description of Artificial Sequence: Synthetic peptide
DGSNRAT

SEQ ID NO: 2696 - protein, 7 aa, Artificial Sequence
  Description of Artificial Sequence: Synthetic peptide
DTSNRAT

SEQ ID NO: 2697 - protein, 7 aa, Artificial Sequence
  Description of Artificial Sequence: Synthetic peptide
DSSNRAT

SEQ ID NO: 2698 - protein, 7 aa, Artificial Sequence
  Description of Artificial Sequence: Synthetic peptide
DATNRAT

SEQ ID NO: 2699 - protein, 7 aa, Artificial Sequence
  Description of Artificial Sequence: Synthetic peptide
DTSNRAT

SEQ ID NO: 2700 - protein, 7 aa, Artificial Sequence
  Description of Artificial Sequence: Synthetic peptide
GASNRAT

SEQ ID NO: 2701 - protein, 7 aa, Artificial Sequence
  Description of Artificial Sequence: Synthetic peptide
DTSNRAT

SEQ ID NO: 2702 - protein, 7 aa, Artificial Sequence
  Description of Artificial Sequence: Synthetic peptide
DASNRAT

SEQ ID NO: 2703 - protein, 7 aa, Artificial Sequence
  Description of Artificial Sequence: Synthetic peptide
DAVNRAT

SEQ ID NO: 2704 - skipped

SEQ ID NO: 2705 - protein, 7 aa, Artificial Sequence
  Description of Artificial Sequence: Synthetic peptide
DVSNRAT

SEQ ID NO: 2706 - protein, 7 aa, Artificial Sequence
  Description of Artificial Sequence: Synthetic peptide
DASNRAT

SEQ ID NO: 2707 - protein, 7 aa, Artificial Sequence
  Description of Artificial Sequence: Synthetic peptide
DASNRAT

SEQ ID NO: 2708 - protein, 7 aa, Artificial Sequence
  Description of Artificial Sequence: Synthetic peptide
DAVNRAT

SEQ ID NO: 2709 - protein, 7 aa, Artificial Sequence
  Description of Artificial Sequence: Synthetic peptide
DVSNRAT

SEQ ID NO: 2710 - protein, 7 aa, Artificial Sequence
  Description of Artificial Sequence: Synthetic peptide
DTSNRAT

SEQ ID NO: 2711 - protein, 7 aa, Artificial Sequence
  Description of Artificial Sequence: Synthetic peptide
DTSNRAT

SEQ ID NO: 2712 - protein, 7 aa, Artificial Sequence
  Description of Artificial Sequence: Synthetic peptide
DASNRAT

SEQ ID NO: 2713 - protein, 7 aa, Artificial Sequence
  Description of Artificial Sequence: Synthetic peptide
DASNRAT

SEQ ID NO: 2714 - protein, 7 aa, Artificial Sequence
  Description of Artificial Sequence: Synthetic peptide
DSSNRAT

SEQ ID NO: 2715 - protein, 7 aa, Artificial Sequence
  Description of Artificial Sequence: Synthetic peptide
DSSNRAT

SEQ ID NO: 2716 - protein, 7 aa, Artificial Sequence
  Description of Artificial Sequence: Synthetic peptide
DVSNRAT

SEQ ID NO: 2717 - protein, 7 aa, Artificial Sequence
  Description of Artificial Sequence: Synthetic peptide
DATNRAT

SEQ ID NO: 2718 - protein, 7 aa, Artificial Sequence
  Description of Artificial Sequence: Synthetic peptide
DASNRAT

SEQ ID NO: 2719 - protein, 7 aa, Artificial Sequence
  Description of Artificial Sequence: Synthetic peptide
DAVNRAT

SEQ ID NO: 2720 - protein, 7 aa, Artificial Sequence
  Description of Artificial Sequence: Synthetic peptide
DASNRAT

SEQ ID NO: 2721 - protein, 7 aa, Artificial Sequence
  Description of Artificial Sequence: Synthetic peptide
DAVNRAT

SEQ ID NO: 2722 - protein, 7 aa, Artificial Sequence
  Description of Artificial Sequence: Synthetic peptide
DAVNRAT

SEQ ID NO: 2723 - protein, 7 aa, Artificial Sequence
  Description of Artificial Sequence: Synthetic peptide
DVSNRAT

SEQ ID NO: 2724 - protein, 7 aa, Artificial Sequence
  Description of Artificial Sequence: Synthetic peptide
DVSNRAT

SEQ ID NO: 2725 - protein, 7 aa, Artificial Sequence
  Description of Artificial Sequence: Synthetic peptide
DASNRAT

SEQ ID NO: 2726 - protein, 7 aa, Artificial Sequence
  Description of Artificial Sequence: Synthetic peptide
DASNRAT

SEQ ID NO: 2727 - protein, 7 aa, Artificial Sequence
  Description of Artificial Sequence: Synthetic peptide
DVSNRAT

SEQ ID NO: 2728 - protein, 7 aa, Artificial Sequence
  Description of Artificial Sequence: Synthetic peptide
DSSNRAT

SEQ ID NO: 2729 - protein, 7 aa, Artificial Sequence
  Description of Artificial Sequence: Synthetic peptide
DASNRAT

SEQ ID NO: 2730 - protein, 7 aa, Artificial Sequence
  Description of Artificial Sequence: Synthetic peptide
DASNRAT

SEQ ID NO: 2731 - protein, 7 aa, Artificial Sequence
  Description of Artificial Sequence: Synthetic peptide
DASNRAT

SEQ ID NO: 2732 - protein, 7 aa, Artificial Sequence
  Description of Artificial Sequence: Synthetic peptide
DASNRAT

SEQ ID NO: 2733 - protein, 7 aa, Artificial Sequence
  Description of Artificial Sequence: Synthetic peptide
DVSNRAT

SEQ ID NO: 2734 - protein, 7 aa, Artificial Sequence
  Description of Artificial Sequence: Synthetic peptide
DISNRAT

SEQ ID NO: 2735 - protein, 7 aa, Artificial Sequence
  Description of Artificial Sequence: Synthetic peptide
DTSNRAT

SEQ ID NO: 2736 - protein, 7 aa, Artificial Sequence
  Description of Artificial Sequence: Synthetic peptide
DASNRAT

SEQ ID NO: 2737 - protein, 7 aa, Artificial Sequence
  Description of Artificial Sequence: Synthetic peptide
DTSNRAT

SEQ ID NO: 2738 - protein, 7 aa, Artificial Sequence
  Description of Artificial Sequence: Synthetic peptide
DVSNRAT

SEQ ID NO: 2739 - skipped

SEQ ID NO: 2740 - protein, 7 aa, Artificial Sequence
  Description of Artificial Sequence: Synthetic peptide
DVSNRAT

SEQ ID NO: 2741 - protein, 7 aa, Artificial Sequence
  Description of Artificial Sequence: Synthetic peptide
DASNRAT

SEQ ID NO: 2742 - protein, 7 aa, Artificial Sequence
  Description of Artificial Sequence: Synthetic peptide
DASNRAT

SEQ ID NO: 2743 - protein, 7 aa, Artificial Sequence
  Description of Artificial Sequence: Synthetic peptide
DAFNRAT

SEQ ID NO: 2744 - protein, 7 aa, Artificial Sequence
  Description of Artificial Sequence: Synthetic peptide
DASNRAT

SEQ ID NO: 2745 - protein, 7 aa, Artificial Sequence
  Description of Artificial Sequence: Synthetic peptide
DASNRAT

SEQ ID NO: 2746 - protein, 7 aa, Artificial Sequence
  Description of Artificial Sequence: Synthetic peptide
DATNRAT

SEQ ID NO: 2747 - protein, 7 aa, Artificial Sequence
  Description of Artificial Sequence: Synthetic peptide
DASNRAT

SEQ ID NO: 2748 - protein, 7 aa, Artificial Sequence
  Description of Artificial Sequence: Synthetic peptide
DASNRAT

SEQ ID NO: 2749 - protein, 7 aa, Artificial Sequence
  Description of Artificial Sequence: Synthetic peptide
DASNRAT

SEQ ID NO: 2750 - protein, 7 aa, Artificial Sequence
  Description of Artificial Sequence: Synthetic peptide
DTSNRAT

SEQ ID NO: 2751 - protein, 7 aa, Artificial Sequence
  Description of Artificial Sequence: Synthetic peptide
DTSNRAT

SEQ ID NO: 2752 - protein, 7 aa, Artificial Sequence
  Description of Artificial Sequence: Synthetic peptide
DTSNRAT

SEQ ID NO: 2753 - protein, 7 aa, Artificial Sequence
  Description of Artificial Sequence: Synthetic peptide
DTSNRAT

SEQ ID NO: 2754 - protein, 7 aa, Artificial Sequence
  Description of Artificial Sequence: Synthetic peptide
EASSLQS

SEQ ID NO: 2755 - protein, 7 aa, Artificial Sequence
  Description of Artificial Sequence: Synthetic peptide
AASSLQS

SEQ ID NO: 2756 - protein, 7 aa, Artificial Sequence
  Description of Artificial Sequence: Synthetic peptide
DVSNRAT

SEQ ID NO: 2757 - protein, 11 aa, Artificial Sequence
  Description of Artificial Sequence: Synthetic peptide
CQQSYGLPPTF

SEQ ID NO: 2758 - protein, 10 aa, Artificial Sequence [sequence omitted]

SEQ ID NO: 2759 - protein, 12 aa, Artificial Sequence [sequence omitted]

SEQ ID NO: 2760 - protein, 12 aa, Artificial Sequence [sequence omitted]

SEQ ID NO: 2761 - protein, 12 aa, Artificial Sequence [sequence omitted]

SEQ ID NO: 2762 - protein, 12 aa, Artificial Sequence [sequence omitted]

SEQ ID NO: 2763 - protein, 12 aa, Artificial Sequence [sequence omitted]

SEQ ID NO: 2764 - protein, 12 aa, Artificial Sequence [sequence omitted]

SEQ ID NO: 2765 - protein, 11 aa, Artificial Sequence
  Description of Artificial Sequence: Synthetic peptide
CQQNYSTTWTF

SEQ ID NO: 2766 - protein, 12 aa, Artificial Sequence [sequence omitted]

SEQ ID NO: 2767 - protein, 11 aa, Artificial Sequence [sequence omitted]

SEQ ID NO: 2768 - protein, 12 aa, Artificial Sequence
  Description of Artificial Sequence: Synthetic peptide
CQQSHSAPPYFF

SEQ ID NO: 2769 - protein, 12 aa, Artificial Sequence
  Description of Artificial Sequence: Synthetic peptide
CQQSHSAPPYFF

SEQ ID NO: 2770 - protein, 12 aa, Artificial Sequence
  Description of Artificial Sequence: Synthetic peptide
CQQSYSAPPYFF

SEQ ID NO: 2771 - protein, 11 aa, Artificial Sequence [sequence omitted]

SEQ ID NO: 2772 - protein, 7 aa, Artificial Sequence [sequence omitted]

SEQ ID NO: 2773 - protein, 11 aa, Artificial Sequence [sequence omitted]

SEQ ID NO: 2774 - protein, 11 aa, Artificial Sequence [sequence omitted]

SEQ ID NO: 2775 - protein, 11 aa, Artificial Sequence [sequence omitted]

SEQ ID NO: 2776 - protein, 11 aa, Artificial Sequence [sequence omitted]

SEQ ID NO: 2777 - protein, 11 aa, Artificial Sequence [sequence omitted]

SEQ ID NO: 2778 - protein, 11 aa, Artificial Sequence [sequence omitted]

SEQ ID NO: 2779 - protein, 11 aa, Artificial Sequence [sequence omitted]

SEQ ID NO: 2780 - protein, 11 aa, Artificial Sequence [sequence omitted]

SEQ ID NO: 2781 - protein, 11 aa, Artificial Sequence [sequence omitted]

SEQ ID NO: 2782 - protein, 11 aa, Artificial Sequence
  Description of Artificial Sequence: Synthetic peptide
CQQSLSPPFTF

SEQ ID NO: 2783 - protein, 11 aa, Artificial Sequence [sequence omitted]

SEQ ID NO: 2784 - protein, 11 aa, Artificial Sequence
  Description of Artificial Sequence: Synthetic peptide
CQQSFSPPFTF

SEQ ID NO: 2785 - protein, 11 aa, Artificial Sequence [sequence omitted]

SEQ ID NO: 2786 - protein, 11 aa, Artificial Sequence [sequence omitted]

SEQ ID NO: 2787 - protein, 11 aa, Artificial Sequence
  Description of Artificial Sequence: Synthetic peptide
CQQSYGLPPTF

SEQ ID NO: 2788 - protein, 12 aa, Artificial Sequence [sequence omitted]

SEQ ID NO: 2789 - protein, 12 aa, Artificial Sequence [sequence omitted]

SEQ ID NO: 2790 - protein, 10 aa, Artificial Sequence [sequence omitted]

SEQ ID NO: 2791 - protein, 12 aa, Artificial Sequence [sequence omitted]

SEQ ID NO: 2792 - protein, 11 aa, Artificial Sequence [sequence omitted]

SEQ ID NO: 2793 - protein, 12 aa, Artificial Sequence [sequence omitted]

SEQ ID NO: 2794 - protein, 12 aa, Artificial Sequence
  Description of Artificial Sequence: Synthetic peptide
CQQSHSAPPYFF

SEQ ID NO: 2795 - protein, 12 aa, Artificial Sequence
  Description of Artificial Sequence: Synthetic peptide
CQQSHSAPPYFF

SEQ ID NO: 2796 - protein, 12 aa, Artificial Sequence [sequence omitted]

SEQ ID NO: 2797 - protein, 12 aa, Artificial Sequence
  Description of Artificial Sequence: Synthetic peptide
CQQSYSAPPYFF

SEQ ID NO: 2798 - protein, 12 aa, Artificial Sequence [sequence omitted]

SEQ ID NO: 2799 - protein, 11 aa, Artificial Sequence [sequence omitted]

SEQ ID NO: 2800 - protein, 11 aa, Artificial Sequence
  Description of Artificial Sequence: Synthetic peptide
CQQNYSTTWTF

SEQ ID NO: 2801 - protein, 12 aa, Artificial Sequence [sequence omitted]

SEQ ID NO: 2802 - protein, 12 aa, Artificial Sequence [sequence omitted]

SEQ ID NO: 2803 - protein, 10 aa, Artificial Sequence [sequence omitted]

SEQ ID NO: 2804 - protein, 12 aa, Artificial Sequence [sequence omitted]

SEQ ID NO: 2805 - protein, 11 aa, Artificial Sequence
  Description of Artificial Sequence: Synthetic peptide
CQQGYSAPWTF

SEQ ID NO: 2806 - protein, 11 aa, Artificial Sequence [sequence omitted]

SEQ ID NO: 2807 - protein, 11 aa, Artificial Sequence [sequence omitted]

SEQ ID NO: 2808 - protein, 12 aa, Artificial Sequence [sequence omitted]

SEQ ID NO: 2809 - protein, 11 aa, Artificial Sequence [sequence omitted]

SEQ ID NO: 2810 - protein, 11 aa, Artificial Sequence [sequence omitted]

SEQ ID NO: 2811 - protein, 7 aa, Artificial Sequence [sequence omitted]

SEQ ID NO: 2812 - protein, 11 aa, Artificial Sequence [sequence omitted]

SEQ ID NO: 2813 - protein, 11 aa, Artificial Sequence [sequence omitted]

SEQ ID NO: 2814 - protein, 11 aa, Artificial Sequence [sequence omitted]

SEQ ID NO: 2815 - protein, 11 aa, Artificial Sequence
  Description of Artificial Sequence: Synthetic peptide
CQQSLSPPFTF

SEQ ID NO: 2816 - protein, 11 aa, Artificial Sequence [sequence omitted]

SEQ ID NO: 2817 - protein, 11 aa, Artificial Sequence [sequence omitted]

SEQ ID NO: 2818 - protein, 11 aa, Artificial Sequence [sequence omitted]

SEQ ID NO: 2819 - protein, 11 aa, Artificial Sequence [sequence omitted]

SEQ ID NO: 2820 - protein, 11 aa, Artificial Sequence [sequence omitted]

SEQ ID NO: 2821 - protein, 11 aa, Artificial Sequence
  Description of Artificial Sequence: Synthetic peptide
CQQSFSPPFTF

SEQ ID NO: 2822 - protein, 11 aa, Artificial Sequence [sequence omitted]

SEQ ID NO: 2823 - protein, 11 aa, Artificial Sequence [sequence omitted]

SEQ ID NO: 2824 - protein, 11 aa, Artificial Sequence [sequence omitted]

SEQ ID NO: 2825 - protein, 11 aa, Artificial Sequence [sequence omitted]

SEQ ID NO: 2826 - protein, 11 aa, Artificial Sequence [sequence omitted]

SEQ ID NO: 2827 - protein, 11 aa, Artificial Sequence
  Description of Artificial Sequence: Synthetic peptide
CQQTFSSPFTF

SEQ ID NO: 2828 - protein, 11 aa, Artificial Sequence
  Description of Artificial Sequence: Synthetic peptide
CQQSSLTPWTF

SEQ ID NO: 2829 - protein, 11 aa, Artificial Sequence [sequence omitted]

SEQ ID NO: 2830 - protein, 11 aa, Artificial Sequence [sequence omitted]

SEQ ID NO: 2831 - protein, 11 aa, Artificial Sequence [sequence omitted]

SEQ ID NO: 2832 - protein, 11 aa, Artificial Sequence [sequence omitted]

SEQ ID NO: 2833 - protein, 11 aa, Artificial Sequence
  Description of Artificial Sequence: Synthetic peptide
CQQGYNTPRTF

SEQ ID NO: 2834 - protein, 11 aa, Artificial Sequence
  Description of Artificial Sequence: Synthetic peptide
CQQTYSTPSSF

SEQ ID NO: 2835 - protein, 11 aa, Artificial Sequence
  Description of Artificial Sequence: Synthetic peptide
CQQSHSPPITF

SEQ ID NO: 2836 - protein, 11 aa, Artificial Sequence
  Description of Artificial Sequence: Synthetic peptide
CQESYSAPYTF

SEQ ID NO: 2837 - protein, 11 aa, Artificial Sequence [sequence omitted]

SEQ ID NO: 2838 - protein, 10 aa, Artificial Sequence
  Description of Artificial Sequence: Synthetic peptide
CQQRYSWVTF

SEQ ID NO: 2839 - protein, 11 aa, Artificial Sequence
  Description of Artificial Sequence: Synthetic peptide
CQQRINWPRSF

SEQ ID NO: 2840 - protein, 10 aa, Artificial Sequence
  Description of Artificial Sequence: Synthetic peptide
CQQFSNWPTF

SEQ ID NO: 2841 - protein, 10 aa, Artificial Sequence
  Description of Artificial Sequence: Synthetic peptide
CQQRSNWQPF

SEQ ID NO: 2842 - protein, 10 aa, Artificial Sequence
  Description of Artificial Sequence: Synthetic peptide
CQQFSNWPTF

SEQ ID NO: 2843 - protein, 10 aa, Artificial Sequence
  Description of Artificial Sequence: Synthetic peptide
CQLRSNWYTF

SEQ ID NO: 2844 - protein, 10 aa, Artificial Sequence
  Description of Artificial Sequence: Synthetic peptide
CQQRYSWVTF

SEQ ID NO: 2845 - protein, 10 aa, Artificial Sequence
  Description of Artificial Sequence: Synthetic peptide
CQQRYSWVTF

SEQ ID NO: 2846 - protein, 11 aa, Artificial Sequence
  Description of Artificial Sequence: Synthetic peptide
CQQRSTWPPVF

SEQ ID NO: 2847 - protein, 11 aa, Artificial Sequence
  Description of Artificial Sequence: Synthetic peptide
CQQRTDWPRAF

SEQ ID NO: 2848 - protein, 11 aa, Artificial Sequence
  Description of Artificial Sequence: Synthetic peptide
CQQSSTWPLTF

SEQ ID NO: 2849 - protein, 10 aa, Artificial Sequence
  Description of Artificial Sequence: Synthetic peptide
CQQRSGLITF

SEQ ID NO: 2850 - protein, 9 aa, Artificial Sequence [sequence omitted]

SEQ ID NO: 2851 - protein, 11 aa, Artificial Sequence
  Description of Artificial Sequence: Synthetic peptide
CQQTHSIPKTF

SEQ ID NO: 2852 - protein, 11 aa, Artificial Sequence
  Description of Artificial Sequence: Synthetic peptide
CQQRINWPRSF

SEQ ID NO: 2853 - protein, 11 aa, Artificial Sequence
  Description of Artificial Sequence: Synthetic peptide
CQQRRDWPQTF

SEQ ID NO: 2854 - protein, 11 aa, Artificial Sequence
  Description of Artificial Sequence: Synthetic peptide
CQQRRDWPQTF

SEQ ID NO: 2855 - protein, 11 aa, Artificial Sequence
  Description of Artificial Sequence: Synthetic peptide
CQQRRDWPQTF

SEQ ID NO: 2856 - protein, 11 aa, Artificial Sequence
  Description of Artificial Sequence: Synthetic peptide
CQQRRDWPQTF

SEQ ID NO: 2857 - protein, 11 aa, Artificial Sequence
  Description of Artificial Sequence: Synthetic peptide
CQQRRDWPQTF

SEQ ID NO: 2858 - protein, 11 aa, Artificial Sequence
  Description of Artificial Sequence: Synthetic peptide
CQQRRDWPQTF

SEQ ID NO: 2859 - protein, 12 aa, Artificial Sequence
  Description of Artificial Sequence: Synthetic peptide
CQQRALWPRLTF

SEQ ID NO: 2860 - protein, 10 aa, Artificial Sequence
  Description of Artificial Sequence: Synthetic peptide
CQQFSNWPTF

SEQ ID NO: 2861 - protein, 13 aa, Artificial Sequence
  Description of Artificial Sequence: Synthetic peptide
CQQRDNGPPEGTF

SEQ ID NO: 2862 - protein, 11 aa, Artificial Sequence
  Description of Artificial Sequence: Synthetic peptide
CQQRFTWPTTF

SEQ ID NO: 2863 - protein, 11 aa, Artificial Sequence
  Description of Artificial Sequence: Synthetic peptide
CHQRNNWPPTF

SEQ ID NO: 2864 - protein, 11 aa, Artificial Sequence
  Description of Artificial Sequence: Synthetic peptide
CQQQSNWPGTF

SEQ ID NO: 2865 - protein, 12 aa, Artificial Sequence
  Description of Artificial Sequence: Synthetic peptide
CQQRTNWPLFSF

SEQ ID NO: 2866 - protein, 11 aa, Artificial Sequence
  Description of Artificial Sequence: Synthetic peptide
CQHRDDWPPTF

SEQ ID NO: 2867 - protein, 11 aa, Artificial Sequence
  Description of Artificial Sequence: Synthetic peptide
CQQRSNWQGNF

SEQ ID NO: 2868 - protein, 11 aa, Artificial Sequence
  Description of Artificial Sequence: Synthetic peptide
CQQHYSWPLTF

SEQ ID NO: 2869 - protein, 12 aa, Artificial Sequence
  Description of Artificial Sequence: Synthetic peptide
CQQGRNWPPSSF

SEQ ID NO: 2870 - protein, 11 aa, Artificial Sequence
  Description of Artificial Sequence: Synthetic peptide
CQERSNWPDTF

SEQ ID NO: 2871 - protein, 11 aa, Artificial Sequence
  Description of Artificial Sequence: Synthetic peptide
CQQRYNWPSTF

SEQ ID NO: 2872 - protein, 13 aa, Artificial Sequence
  Description of Artificial Sequence: Synthetic peptide
CQQRTNLPPSITF

SEQ ID NO: 2873 - protein, 10 aa, Artificial Sequence
  Description of Artificial Sequence: Synthetic peptide
CQQRSDSITF

SEQ ID NO: 2874 - skipped

SEQ ID NO: 2875 - protein, 12 aa, Artificial Sequence
  Description of Artificial Sequence: Synthetic peptide
CQQRDYWPPYTF

SEQ ID NO: 2876 - protein, 12 aa, Artificial Sequence
  Description of Artificial Sequence: Synthetic peptide
CQQRHYWPPITF

SEQ ID NO: 2877 - protein, 11 aa, Artificial Sequence
  Description of Artificial Sequence: Synthetic peptide
CQQRDSWPHTF

SEQ ID NO: 2878 - protein, 9 aa, Artificial Sequence
  Description of Artificial Sequence: Synthetic peptide
CQQRSLWPF

SEQ ID NO: 2879 - protein, 9 aa, Artificial Sequence
  Description of Artificial Sequence: Synthetic peptide
CQQRDTFTF

SEQ ID NO: 2880 - protein, 11 aa, Artificial Sequence
  Description of Artificial Sequence: Synthetic peptide
CQQRSTWPPVF

SEQ ID NO: 2881 - protein, 9 aa, Artificial Sequence
  Description of Artificial Sequence: Synthetic peptide
CQYRSNFTF

SEQ ID NO: 2882 - protein, 11 aa, Artificial Sequence
  Description of Artificial Sequence: Synthetic peptide
CQQISNWPLTF

SEQ ID NO: 2883 - protein, 11 aa, Artificial Sequence
  Description of Artificial Sequence: Synthetic peptide
CQQRENWPPTF

SEQ ID NO: 2884 - protein, 10 aa, Artificial Sequence
  Description of Artificial Sequence: Synthetic peptide
CQQRNWPYTF

SEQ ID NO: 2885 - protein, 11 aa, Artificial Sequence
  Description of Artificial Sequence: Synthetic peptide
CQQRTDWPPSF

SEQ ID NO: 2886 - protein, 12 aa, Artificial Sequence
  Description of Artificial Sequence: Synthetic peptide
CQQRKSWPPFTF

SEQ ID NO: 2887 - protein, 11 aa, Artificial Sequence
  Description of Artificial Sequence: Synthetic peptide
CQRRTDWPPTF

SEQ ID NO: 2888 - protein, 12 aa, Artificial Sequence
  Description of Artificial Sequence: Synthetic peptide
CQQRTDWPPATF

SEQ ID NO: 2889 - protein, 11 aa, Artificial Sequence
  Description of Artificial Sequence: Synthetic peptide
CQQRFTWPTTF

SEQ ID NO: 2890 - protein, 11 aa, Artificial Sequence
  Description of Artificial Sequence: Synthetic peptide
CQHRDDWPPTF

SEQ ID NO: 2891 - protein, 12 aa, Artificial Sequence
  Description of Artificial Sequence: Synthetic peptide
CQQRNSWPPATF

SEQ ID NO: 2892 - protein, 11 aa, Artificial Sequence
  Description of Artificial Sequence: Synthetic peptide
CQQVSNWPLTF

SEQ ID NO: 2893 - protein, 12 aa, Artificial Sequence
  Description of Artificial Sequence: Synthetic peptide
CQVRSDWPPLTF

SEQ ID NO: 2894 - protein, 12 aa, Artificial Sequence
  Description of Artificial Sequence: Synthetic peptide
CQQRRGWPPVTF

SEQ ID NO: 2895 - protein, 11 aa, Artificial Sequence
  Description of Artificial Sequence: Synthetic peptide
CHQHSDWPLTF

SEQ ID NO: 2896 - protein, 10 aa, Artificial Sequence
  Description of Artificial Sequence: Synthetic peptide
CQQRYSYFTF

SEQ ID NO: 2897 - protein, 12 aa, Artificial Sequence
  Description of Artificial Sequence: Synthetic peptide
CQQSSNWPLFTF

SEQ ID NO: 2898 - protein, 12 aa, Artificial Sequence
  Description of Artificial Sequence: Synthetic peptide
CQQRNTWPGVTF

SEQ ID NO: 2899 - protein, 7 aa, Artificial Sequence
  Description of Artificial Sequence: Synthetic peptide
CQERSLF

SEQ ID NO: 2900 - protein, 11 aa, Artificial Sequence
  Description of Artificial Sequence: Synthetic peptide
CQERSDWPITF

SEQ ID NO: 2901 - protein, 11 aa, Artificial Sequence
  Description of Artificial Sequence: Synthetic peptide
CQQRSTWPPVF

SEQ ID NO: 2902 - protein, 10 aa, Artificial Sequence
  Description of Artificial Sequence: Synthetic peptide
CQQRSIPITF

SEQ ID NO: 2903 - protein, 12 aa, Artificial Sequence
  Description of Artificial Sequence: Synthetic peptide
CQERGNWPPFTF

SEQ ID NO: 2904 - protein, 10 aa, Artificial Sequence
  Description of Artificial Sequence: Synthetic peptide
CQQRRSGLTF

SEQ ID NO: 2905 - protein, 11 aa, Artificial Sequence
  Description of Artificial Sequence: Synthetic peptide
CQQRASWPLSF

SEQ ID NO: 2906 - protein, 11 aa, Artificial Sequence
  Description of Artificial Sequence: Synthetic peptide
CQQSGSWPLTF

SEQ ID NO: 2907 - protein, 12 aa, Artificial Sequence
  Description of Artificial Sequence: Synthetic peptide
CQVRSNWPPLTF

SEQ ID NO: 2908 - protein, 11 aa, Artificial Sequence
  Description of Artificial Sequence: Synthetic peptide
CQQRADWPQTF

SEQ ID NO: 2909 - skipped

SEQ ID NO: 2910 - protein, 9 aa, Artificial Sequence
  Description of Artificial Sequence: Synthetic peptide
CQQRDSFTF

SEQ ID NO: 2911 - protein, 11 aa, Artificial Sequence
  Description of Artificial Sequence: Synthetic peptide
CQQRAYWPGTF

SEQ ID NO: 2912 - protein, 9 aa, Artificial Sequence
  Description of Artificial Sequence: Synthetic peptide
CQHRRLLTF

SEQ ID NO: 2913 - protein, 11 aa, Artificial Sequence
  Description of Artificial Sequence: Synthetic peptide
CQQRQDWPLTF

SEQ ID NO: 2914 - protein, 11 aa, Artificial Sequence
  Description of Artificial Sequence: Synthetic peptide
CQQRRRWPPTF

SEQ ID NO: 2915 - protein, 10 aa, Artificial Sequence
  Description of Artificial Sequence: Synthetic peptide
CQQRTHGVTF

SEQ ID NO: 2916 - protein, 11 aa, Artificial Sequence
  Description of Artificial Sequence: Synthetic peptide
CQQRQKWPLTF

SEQ ID NO: 2917 - protein, 10 aa, Artificial Sequence
  Description of Artificial Sequence: Synthetic peptide
CQQRRNSLTF

SEQ ID NO: 2918 - protein, 12 aa, Artificial Sequence
  Description of Artificial Sequence: Synthetic peptide
CQQRSTWSPLTF

SEQ ID NO: 2919 - protein, 12 aa, Artificial Sequence
  Description of Artificial Sequence: Synthetic peptide
CQLRTNWPPVTF

SEQ ID NO: 2920 - protein, 10 aa, Artificial Sequence
  Description of Artificial Sequence: Synthetic peptide
CQQRSSNWTF

SEQ ID NO: 2921 - protein, 11 aa, Artificial Sequence
  Description of Artificial Sequence: Synthetic peptide
CQQRGSFPLTF

SEQ ID NO: 2922 - protein, 10 aa, Artificial Sequence
  Description of Artificial Sequence: Synthetic peptide
CQQRSIRGTF

SEQ ID NO: 2923 - protein, 11 aa, Artificial Sequence
  Description of Artificial Sequence: Synthetic peptide
CQQRGGWPPAF

SEQ ID NO: 2924 - protein, 11 aa, Artificial Sequence
  Description of Artificial Sequence: Synthetic peptide
CLHTYLPPYSF

SEQ ID NO: 2925 - protein, 11 aa, Artificial Sequence
  Description of Artificial Sequence: Synthetic peptide
CQQTYNFPHTF

SEQ ID NO: 2926 - protein, 12 aa, Artificial Sequence
  Description of Artificial Sequence: Synthetic peptide
CQQRHHWPPVTF

SEQ ID NO: 2927 - protein, 123 aa, Artificial Sequence
  Description of Artificial Sequence: Synthetic polypeptide
EVQLLESGGGLVQPGGSLRLSCAASGFTFSSYAMNWVRQAPGKGLEWVSAISGSGVSTYYADSVKGRFTISRDNSKNTLYLQMNSLRAEDTAVYYCAKGDSGSYYGSSYFDYWGQGTLVTVSS

SEQ ID NO: 2928 - protein, 130 aa, Artificial Sequence
  Description of Artificial Sequence: Synthetic polypeptide
EVQLLESGGGLVQPGGSLRLSCAASGFTFSSYGMSWVRQAPGKGLEWVSAISGSGGNTYYADSVKGRFTISRDNSKNTLYLQMNSLRAEDTAVYYCTRVRRGSGVAPYSSSWGRYYFDYWGQGTLVTVSS

SEQ ID NO: 2929 - protein, 127 aa, Artificial Sequence
  Description of Artificial Sequence: Synthetic polypeptide
EVQLLESGGGLVQPGGSLRLSCAASGFRFSSYSMSWVRQAPGKGLEWVSAISGSGGSSYYADSVKGRFTISRDNSKNTLYLQMNSLRAEDTAVYYCAKDGSGTIFGVVIAKYYFDYWGQGTLVTVSS

SEQ ID NO: 2930 - protein, 123 aa, Artificial Sequence
  Description of Artificial Sequence: Synthetic polypeptide
EVQLLESGGGLVQPGGSLRLSCAASGFTFSAYAMSWVRQAPGKGLEWVSAISGSGGSTHYADSVKGRFTISRDNSKNTLYLQNSLRAEDTAVYYCASWGPLWSGSPNDAFDIWGQGTLVTVSS

SEQ ID NO: 2931 - protein, 126 aa, Artificial Sequence
  Description of Artificial Sequence: Synthetic polypeptide
EVQLLESGGGLVQPGGSLRLSCAASGFFSSYAMGWVRQAPGKGLEWVSAISGSGYSTYYADSVKGRFTISRDNSKNTLYLQMNSLRAEDTAVYYCARVRSYDSTAYDEPLDALDIWGQGTLVTVSS

SEQ ID NO: 2932 - protein, 124 aa, Artificial Sequence
  Description of Artificial Sequence: Synthetic polypeptide
EVQLLESGGGLVQPGGSLRLSCAASGFTFSSFAMSWVRQAPGKGLEWVSAISGSGVSTYYADSVKGRFTISRDNSKNTLYLQMNSLRAEDTAVYYCGRDARSSGYNGYDLFDIWGQGTLVTVSS

SEQ ID NO: 2933 - protein, 117 aa, Artificial Sequence
  Description of Artificial Sequence: Synthetic polypeptide
EVQLLESGGGLVQPGGSLRLSCAASGFTFSAYAMSWRQAPGKGLEWVSAISGSGGSYYADSVKGRFTISRDNSKNTLYLQMNSLRAEDTAVYYCAKGPLVGWYFDLWGQGTLVTVSS

SEQ ID NO: 2934 - protein, 124 aa, Artificial Sequence
  Description of Artificial Sequence: Synthetic polypeptide
EVQLLESGGGLVQPGGSLRLSCAASGFTFGSYAMSWVRQAPGKGLEWVSLISGSGGSTYYADSVKGRFTISRDNSKNTLYLQMNSLRAEDTAVYYCASWGPLWSGSPNDAFDIWGQGTLVTVSS

SEQ ID NO: 2935 - protein, 123 aa, Artificial Sequence
  Description of Artificial Sequence: Synthetic polypeptide
EVQLLESGGGLVQPGGSLRLSCAASGFTFSAYAMSWVRQAPGKGLEWVSAISGSGGSTFYADSVKGRFTISRDNSKNTLYLQMNSLRAEDTAVYYCTRQGDSSGWYDGWFDPWGQGTLVTVSS

SEQ ID NO: 2936 - protein, 117 aa, Artificial Sequence
  Description of Artificial Sequence: Synthetic polypeptide
EVQLLESGGGLVQPGGSLRLSCAASGFIFSSYAMSWVRQAPGKGLEWVSIISGSGGSTYYADSVKGRFTISRDNSKNTLYLQMNSLRAEDTAVYYCIATVVSPLDYWGQGTLVTVSS

SEQ ID NO: 2937 - protein, 121 aa, Artificial Sequence
  Description of Artificial Sequence: Synthetic polypeptide
EVQLLESGGGLVQPGGSLRLSCAASGFTFSDYAMSWVRQAPGKGLEWVSTISGSGGSTYYADSVKGRFTISRDNSKNTLYLQMNSLRAEDTAVYYCARDESSSSLNWFDPWGQGTLVTVSS

SEQ ID NO: 2938 - protein, 121 aa, Artificial Sequence
  Description of Artificial Sequence: Synthetic polypeptide
EVQLLESGGGLVQPGGSLRLSCAASGFTFSSYAMIWVRQAPGKGLEWVSAISGSAGSTYYADSVKGRFTISRDNSKNTLYLQMNSLRAEDTAVYYCASPDPLGSVADLDYWGQGTLVTVSS

SEQ ID NO: 2939 - protein, 119 aa, Artificial Sequence
  Description of Artificial Sequence: Synthetic polypeptide
EVQLLESGGGLVQPGGSLRLSCAASGFTFGSYAMSWVRQAPGKGLEWVSAISGSGGTTYYADSVKGRFTISRDNSKNTLYLQMNSLRAEDTAVYYCARVWSSSSVFDYWGQGTLVTVSS

SEQ ID NO: 2940 - protein, 120 aa, Artificial Sequence
  Description of Artificial Sequence: Synthetic polypeptide
EVQLLESGGGLVQPGGSLRLSCAASGFTFSRYAMSWRQAPGKGLEWVSAISGSGASTYYADSVKGRFTISRDNKNTLYLQMNSLRAEDTAVYYCAKDRGGGSYYGTFDYWGQGTLVTVSS

SEQ ID NO: 2941 - protein, 124 aa, Artificial Sequence
  Description of Artificial Sequence: Synthetic polypeptide
EVQLLESGGGLVQPGGSLRLSCAASGSTFSSYAMSWVRQAPGKGLEWVSAISGSGATYYADSVKGRFTISRDNSKNTLYLQMNSLRAEDTAVYYCTRVRVAGYSSSWYDAFDIWGQGTLVTVSS

SEQ ID NO: 2942 - protein, 124 aa, Artificial Sequence
  Description of Artificial Sequence: Synthetic polypeptide
EVQLLESGGGLVQPGGSLRLSCAASGFTFSSYAMTWVRQAPGKGLEWVSAISGSGGNTYYADSVKGRFTISRDNSKNTLYLQMNSLRAEDTAVYYCVKGTIPIFGVIRSAFDYWGQGTLVTVSS

SEQ ID NO: 2943 - protein, 119 aa, Artificial Sequence
  Description of Artificial Sequence: Synthetic polypeptide
EVQLLESGGGLVQPGGSLRLSCAASGFTFSSYVMSWVRQAPGKGLEWVSSISGSGGSTYYADSVKGRFTISRDNSKNTLYLQMNSLRAEDTAVYYCARGSGSYSFFDYWGQGTLVTVSS

SEQ ID NO: 2944 - protein, 124 aa, Artificial Sequence
  Description of Artificial Sequence: Synthetic polypeptide
EVQLLESGGGLVQPGGSLRLSCAASGFTFSSYANWVRQAPGKGLEWVSAISGSGVSTYYADSVKGRFTISRDNSKNTLYLQMNSLRAEDTAVYYCATTPGPWIQLWFGGGFDYWGQGTLVTVSS

SEQ ID NO: 2945 - protein, 120 aa, Artificial Sequence
  Description of Artificial Sequence: Synthetic polypeptide
EVQLLESGGGLVQPGGSLRLSCAASGFTFSSYDMSWVRQAPGKGLEWVSAISGSAGSTTMRDSVKGRFTISRDNSKNTLYLQMNSLRAEDTAVYYCAKDGLVVAGTFDYWGQGTLVTVSS

SEQ ID NO: 2946 - protein, 121 aa, Artificial Sequence
  Description of Artificial Sequence: Synthetic polypeptide
EVQLLESGGGLVQPGGSLRLSCAASGFTFSGYAMSWVRQAPGKGLEWVSALSGSGGSTYYADSVKGRFTISRDNSKNTLYLQMNSLRAEDTAVYYCARGALLEWLSRFDNWGQGTLVTVSS

SEQ ID NO: 2947 - protein, 118 aa, Artificial Sequence
  Description of Artificial Sequence: Synthetic polypeptide
EVQLLESGGGLVQPGGSLRLSCAASGFTLSSYAMSWVRQAPGKGLEWVSAISGSGGTTYYADSVKGFTISRDNSKNTLYLQMNSLRAEDTAVYYCARDLGAADLIDYWGQGTLVTVSS

SEQ ID NO: 2948 - protein, 123 aa, Artificial Sequence
  Description of Artificial Sequence: Synthetic polypeptide
EVQLLESGGGLVQPGGSLRLSCAASGFIFSSYAMSWVRQAPGKGLEWISAISGSGGTYYADSVKGRFTISRDNSKNTLYLQMNSPRAEDTAVYYCVRVPAAAGKGVPGIFDIWGQGTLVTVSS

SEQ ID NO: 2949 - protein, 123 aa, Artificial Sequence
  Description of Artificial Sequence: Synthetic polypeptide
EVQLLESGGGLVQPGGSLRLSCAASGFTFSSYAMGWVRQAPGKGLEWVSAIRGSGGSTYYADSVKGRFTISRDNSKNTLYLQMNSLRAEDTAVYYCARVRQGLRRTWYYFDYWGQGTLVTVSS

SEQ ID NO: 2950 - protein, 118 aa, Artificial Sequence
  Description of Artificial Sequence: Synthetic polypeptide
EVQLLESGGGLVQPGGSLRLSCAASGSTFSSYAMSWVRQAPGKGLEWVSAIGGSGGSTYYADSVKGRFTISRDNSKNTLYLQMNSLRAEDTAVYYCAKEYSSSWFDPWGQGTLVTVSS

SEQ ID NO: 2951 - protein, 121 aa, Artificial Sequence
  Description of Artificial Sequence: Synthetic polypeptide
EVQLLESGGGLVQPGGSLSCAASGFTFSSYTMSWVRQAPGKGLEWVSAISVSGGSTYYADSVKGRFTISRDNSKNTLYLQMNSLRAEDTAVYYCAKREDYDFWSGRGAFDIWGQGTLVTIS

SEQ ID NO: 2952 - protein, 120 aa, Artificial Sequence
  Description of Artificial Sequence: Synthetic polypeptide
EVQLLESGGGLVQPGGSLRLSCAASGFTFSSYAMYWVRQAPGKGLEWVSAISGSGGTYYADSVKGRFTISRDNSKNTLYLQMNSLRAEDTAVYYCAKDIGYSSSWSFDYWGQGTLVTVSS

SEQ ID NO: 2953 - protein, 119 aa, Artificial Sequence
  Description of Artificial Sequence: Synthetic polypeptide
EVQLLESGGGLVQPGGSLRLSCAASGFTFRSYAMSWVRQAPGKGLEWVSAISGSGRSTYYASVKGRFTISRDNSKNTLYLQMNSLRAEDTAVYYCARDDYSDYRPFDYWGQGTLVTVSS

SEQ ID NO: 2954 - protein, 122 aa, Artificial Sequence
  Description of Artificial Sequence: Synthetic polypeptide
EVQLLESGGGLVQPGGSLRLSCAASGFTFSSYTMSWVRQAPGKGLEWVSAISGSGGSIYYADSVKGRFTISRDNSKNTLYLQMNSLRAEDTAVYYCAHRPSLQWLDWWFDPWGQGTLVTVSS

SEQ ID NO: 2955 - protein, 122 aa, Artificial Sequence
  Description of Artificial Sequence: Synthetic polypeptide
EVQLLESGGGLVQPGGSLRLSCAASGFTFSSQAMSWVRQAPGKGLEWVSIISGSGGSTYYADSVKGRFTISRDNSKNTLYLQMNSLRAEDTAVYYCAKDGASGWPNWHFDLWGQGTLVTVSS

SEQ ID NO: 2956 - protein, 118 aa, Artificial Sequence
  Description of Artificial Sequence: Synthetic polypeptide
EVQLLESGGGLVQPGGSLRLSCAASGFTFSSYPMSWVRQAPGKGLEWVSAISGSGGRTYYADSVKGRFTISRDNSKNTLYLQMNSLRAEDTAVYYCAKGAAAGPFDYWGQGTLVTVSS

SEQ ID NO: 2957 - protein, 122 aa, Artificial Sequence
  Description of Artificial Sequence: Synthetic polypeptide
EVQLLESGGGLVQPGGSLRLSCAASGFTFSSYAMTWVRQAPGKGLEWVSAISGGTTYYADSVKGRFTISRDNSKNTLYLQMNSLRAEDTAVYYCAKEEYYYDSSGPNWFDPWGQGTLVTVSS

SEQ ID NO: 2958 - protein, 121 aa, Artificial Sequence
  Description of Artificial Sequence: Synthetic polypeptide
EVQLLESGGGLVQPGGSLRLSCAASGFTFSSYAMSWVRQAPGKGLEWVTAISVSGGSTYYADSVKGRFTISRDNSKNTLYLQNSLKTQETAGYYWAPQGGTTVPTGRFDPWGQRTLVTVSS

SEQ ID NO: 2959 - protein, 122 aa, Artificial Sequence
  Description of Artificial Sequence: Synthetic polypeptide
EVQLLESGGGLVQPGGSLRLSCAASGFTFSSYAMSWVRQAPGKGLEWVSAISGSSGSTYYADSVKGRFTISRDNSKNTLYLQMNSLRAEDTAVYYCSRGGGPAAGFHGLDVWGQGTLVTVSS

SEQ ID NO: 2960 - protein, 124 aa, Artificial Sequence
  Description of Artificial Sequence: Synthetic polypeptide
EVQLLESGGGLVQPGGSLRLSCAASGFTFSSYAVSWVRQAPGKGLEWVSAISASGGSTYYADSVKGRFTISRDNSKNTLYLQMNSLRAEDTAVYYCARAAKRQQLFPRNYFDYWGQGTLVTVSS

SEQ ID NO: 2961 - protein, 119 aa, Artificial Sequence
  Description of Artificial Sequence: Synthetic polypeptide
EVQLLESGGGLVQPGGSLRLSCAASGFTFSSYPMSWVRQAPGKGLEWVSAIRGSGGSTYYADSVKGRFTISRDNSKNTLYLQMNSLRAEDTAVYYCALHYGSGRSFDYWGQGTLVTVSS

SEQ ID NO: 2962 - protein, 124 aa, Artificial Sequence
  Description of Artificial Sequence: Synthetic polypeptide
EVQLLESGGGLVQPGGSLRLSCAASGFTFSSYGMSWVRQAPGKGLEWVSAISGSGGATYYADSVKGRFTISRDNSKNTLYLQMNSLRAEDTAVYYCARPGGRIVGALWGAFDYWGQGTLVTVSS

SEQ ID NO: 2963 - protein, 120 aa, Artificial Sequence
  Description of Artificial Sequence: Synthetic polypeptide
EVQLVESGGGLVQPGGSLRLSCAASGRTFCRYSMGWFRQAPGKERELVATWRPANTNYADSVKGRFTISADNSKNTAYLQMNSLKPEDTAVYYCAKNWGDAGTTWFEKSGWGQGTLVTSS

SEQ ID NO: 2964 - protein, 114 aa, Artificial Sequence
  Description of Artificial Sequence: Synthetic polypeptide
EVQLVESGGGLVQPGGSLRLSCAASGNIFSRYIMGWFRQAPGKERELVAAISRTGGSTYYADSVKGRFTISADNSKNTAYLQMNSLKPEDTAVYYCAIDPDGEWGQGTLVTVSS

SEQ ID NO: 2965 - protein, 118 aa, Artificial Sequence
  Description of Artificial Sequence: Synthetic polypeptide
EVQLVESGGGLVQPGGSLRLSCAASGRTLAGYTMGWFRQAPGKERELLAEIYPSGNGVYYADSVKGRFTISADNSKNTAYLQMNSLKPEDTAVYYCAADVRDSIWRSWGQGTLVTVSS

SEQ ID NO: 2966 - protein, 121 aa, Artificial Sequence
  Description of Artificial Sequence: Synthetic polypeptide
EVQLVESGGGLVQPGGSLRLSCAASGSTLSRYSMGWFRQAPGKEREFVAAIARRERVYADSVKGRFTISADNSKNTAYLQMNSLKPEDTAVYYCARLSCHDYSCYSAFDFWGQGTLVTVSS

SEQ ID NO: 2967 - protein, 118 aa, Artificial Sequence
  Description of Artificial Sequence: Synthetic polypeptide
EVQLVESGGGLVQPGGSLRLSCAASGSIFSSAAMGWFRQAPGKEREFEAISWRTGTTYYADSVKGRFTISADNSKNTAYLQMNSLKPEDTAVYYCAAAGSMGWNHLRDYDWGQGTLVT

SEQ ID NO: 2968 - protein, 120 aa, Artificial Sequence
  Description of Artificial Sequence: Synthetic polypeptide
EVQLVESGGGLVQPGGSLRLSCAATFSGYLMGWFRQAPGKEREFVAGIWRSGVSLYYADSVKGRFTISADNSKNTAYLQMNSLKPEDTAVYYCAARSGWGAAMRSADFRWGQGTLVTVSS

SEQ ID NO: 2969 - protein, 123 aa, Artificial Sequence
  Description of Artificial Sequence: Synthetic polypeptide
EVQLVESGGGLVQPGGSLRLSCAASGRTFSSYDMGWFRQAPGKERERVAIIKSDGSTYYADSVKGRFTISADNSKNTAYLQMNSLKPEDTAVYYCARSPRFSGVVVRPGLDLWGQGTLVTVSS

SEQ ID NO: 2970 - protein, 120 aa, Artificial Sequence
  Description of Artificial Sequence: Synthetic polypeptide
EVQLVESGGGLVQPGGSLRLSCAASGSISSYFMGWFRQAPGKEREWVSSIGIAGTPTLYADSVKGRFTISADNSKNTAYLQMNSLKPEDTAVYYCAACSDYYCSGVGAVWGQGTLVTVSS

SEQ ID NO: 2971 - protein, 127 aa, Artificial Sequence
  Description of Artificial Sequence: Synthetic polypeptide
EVQLVESGGGLVQPGGSLRLSCAASGPTFSTYAMGWFRQAPGKEREFVAAVINGGTTNYADSVKGRFTISADNSKNTAYLQMNSLKPEDTAVYYCAKDSWDSSGYSYHYYYYGMDVWGQGTLVTVSS

SEQ ID NO: 2972 - protein, 119 aa, Artificial Sequence
  Description of Artificial Sequence: Synthetic polypeptide
EVQLVESGGGLVQPGGSLRLSCAASGIIGSFRTMGWFRQAPGKERELAGFTGSGRSQYYADSVKGRFTISADNSKNTAYLQMNSLKPEDTAVYYCARGDIAVIQVLDYWGQGTLVTVSS

SEQ ID NO: 2973 - protein, 115 aa, Artificial Sequence
  Description of Artificial Sequence: Synthetic polypeptide
EVQLVESGGGLVQPGGSLRLSCAASGGTFASYGMGWFRQAPGKEREWVAGIWEDSSAAHYAESVKGRFTISADNSKNTAYLQMNSLKPEDTAVYYCAYSGIGTDWGQGTLVTVSS

SEQ ID NO: 2974 - protein, 114 aa, Artificial Sequence
  Description of Artificial Sequence: Synthetic polypeptide
EVQLVESGGGLVQPGGSLRLSCAASGLTFRNYAMGWFRQAPGKERELVAGITSGGTRNYADSVKGRFTISADNSKNTAYLQMNSLKPEDTAVYYCAAGWGDSAWGQGTLVTVSS

SEQ ID NO: 2975 - protein, 117 aa, Artificial Sequence
  Description of Artificial Sequence: Synthetic polypeptide
EVQLVESGGGLVQPGGSLRLSCAASGSISTINVMGWFRQAPGKEREFVAAISWGGGLTVYADSVKGRFTISADNSKNTAYLQMNSLKPEDTAVYYCAAFDGYTGSDWGQGTLVTVSS

SEQ ID NO: 2976 - protein, 123 aa, Artificial Sequence
  Description of Artificial Sequence: Synthetic polypeptide
EVQLVESGGGLVQPGGSLRLSCAASGGTLSSYIGWFRQAPGKERELVATVRSGSITNYADSVKGRFTISADNSKNTAYLQMNSLKPEDTAVYYCAADLTDIWEGIREYDEYAWGQGTLVTVSS

SEQ ID NO: 2977 - protein, 117 aa, Artificial Sequence
  Description of Artificial Sequence: Synthetic polypeptide
EVQLVESGGGLVQPGGSLRLSCAASGRTFRRYPMGWFRQAPGKEREFVVAVTWSGGSTYYADSVKGRFTISADNSKNTAYLQMNSLKPEDTAVYYCAAGLRGRQYSWGQGTLVTVSS

SEQ ID NO: 2978 - protein, 117 aa, Artificial Sequence
  Description of Artificial Sequence: Synthetic polypeptide
EVQLVESGGGLVQPGGSLRLSCAASGSTFSIDVMGWFRQAPGKEREFVAAISWSGESTLYADSVKGRFTISADNSKNTAYLQMNSLKPEDTAVYYCAAFDGYSGSDWGQGTLVTVSS

SEQ ID NO: 2979 - protein, 120 aa, Artificial Sequence
  Description of Artificial Sequence: Synthetic polypeptide
EVQLVESGGGLVQPGGSLRLSCAASGRTSSSAVMGWFRQAPGKEREFVAAINRGGSTIYVDSVKGRFTISADNSKNTAYLQMNSLKPEDTAVYYCATGPYRSYFARSYLWGQGTLVTVSS

SEQ ID NO: 2980 - protein, 124 aa, Artificial Sequence
  Description of Artificial Sequence: Synthetic polypeptide
EVQLVESGGGLVQPGGSLRLSCAASGGTFSSYRMGWFRQAPGKEREWVSAISWNDGGADYADSVKGRFTISADNSKNTAYLQMNSLKPEDTAVYYCAATQWGSSGWKQARWYDWGQGTLVTVSS

SEQ ID NO: 2981 - protein, 123 aa, Artificial Sequence
  Description of Artificial Sequence: Synthetic polypeptide
EVQLVESGGGLVQPGGSLRLSCAASGTIFASAMGWFRQAPGKERELVAFSSSGGSTYYADSVKGRFTISADNSKNTAYLQMNSLKPEDTAVYYCAKDPIAAADPGDSVSFDYWGQGTLVTVSS

SEQ ID NO: 2982 - protein, 117 aa, Artificial Sequence
  Description of Artificial Sequence: Synthetic polypeptide
EVQLVESGGGLVQPGGSLRLSCAASGFGIDAMGWFRQAPGKEREFVATITEGGATNVGSTSYSVKGRFTISADNSKNTAYLQMNSLKPEDTAVYYCALNVWRTSSDWGQGTLVTVSS

SEQ ID NO: 2983 - protein, 117 aa, Artificial Sequence
  Description of Artificial Sequence: Synthetic polypeptide
EVQLVESGGGLVQPGGSLRLSCAASGNIIGGNHMGWFRQAPGKEREFVGAITSSRSTVYADSVKGRFTISADNSKNTAYLQMNSLKPEDTAVYYCAAVTTQTYGYDWGQGTLVTVSS

SEQ ID NO: 2984 - protein, 119 aa, Artificial Sequence
  Description of Artificial Sequence: Synthetic polypeptide
EVQLVESGGGLVQPGGSLRLSCAASGRTFSRYDMGWFRQAPGKEREFVGGTRSGSTNYADSVKGRFTISADNSKNTAYLQMNSLKPEDTAVYYCARHSDYSGLSNFDYWGQGTLVTVSS

SEQ ID NO: 2985 - protein, 125 aa, Artificial Sequence
  Description of Artificial Sequence: Synthetic polypeptide
EVQLVESGGGLVQPGGSLRLSCAAGRQPAPELRGYGMGWFRQAPGKEREFVAAVIGSSGTTYYADSVKGRFTISADNSKNTAYLQMNSLKPEDTAVYYCAKAKATVGLRAPFDYWGQGTLVTVSS

SEQ ID NO: 2986 - protein, 117 aa, Artificial Sequence
  Description of Artificial Sequence: Synthetic polypeptide
EVQLVESGGGLVQPGGSLRLSCAASGINFSRYGMGWFRQAPGKEREFVASITYLGRTNYADSVKGRFTISADNSKNTAYLQMNSLKPEDTAVYYCALRVRPYGQYDWGQGTLVTVSS

SEQ ID NO: 2987 - protein, 125 aa, Artificial Sequence
  Description of Artificial Sequence: Synthetic polypeptide
EVQLVESGGGLVQPGGSLRLSCAASGRTFRRYAMGWFRQAPGKEREFVAAINWSGARTYYADSVKGRFTISADNSKNTAYLQMNSLKPEDTAVYYCAVSKPLNYYTYYDARRYDWGQGTLVTVSS

SEQ ID NO: 2988 - protein, 125 aa, Artificial Sequence
  Description of Artificial Sequence: Synthetic polypeptide
EVQLVESGGGLVQPGGSLRLSCAASGGTFGHYAMGWFRQAPGKEREFVAAVSWSGSSTYYADSVKGRFTISADNSKNTAYLQMNSLKPEDTAVYYCAVSQPLNYYTYYDARRYDWGQGTLVTVSS

SEQ ID NO: 2989 - protein, 124 aa, Artificial Sequence
  Description of Artificial Sequence: Synthetic polypeptide
EVQLVESGGGLVQPGGSLRLSCAASGFTLDDYAMGWFRQAPGKEREFVAAISWSTGSTYYADSVKGRFTISADNSKNTAYLQMNSLKPEDTAVYYCAASQAPITIATMMKPFYDWGQGTLVTVS

SEQ ID NO: 2990 - protein, 116 aa, Artificial Sequence
  Description of Artificial Sequence: Synthetic polypeptide
EVQLVESGGGLVQPGGSLRLSCAASGFTFRRYDMGWFRQAPGKEREFVSAISGGLAYYADSVKGRFTISADNSKNTAYLQMNSLKPEDTAVYYCAVDLSGDAVYDWGQGTLVTVSS

SEQ ID NO: 2991 - protein, 116 aa, Artificial Sequence
  Description of Artificial Sequence: Synthetic polypeptide
EVQLVESGGGLVQPGGSLRLSCAASGINFSRNAMGWFRQAPGKERELVASITHQDRPIYADSEKGLFTITEDNKKNTDHLMMNLLKPEDTAVYYCALPVGPYGQYDWGQGTLVTWS

SEQ ID NO: 2992 - protein, 117 aa, Artificial Sequence
  Description of Artificial Sequence: Synthetic polypeptide
EVQLVESGGGLVQPGGSLRLSCAASGRTFTTYGMGWFRQAPGKEREFVASITYLGRTYYADSVKGRFTISADNSKNTAYLQMNSLKPEDTAVYYCALRVRPYGQYDWGQGTLVTVSS

SEQ ID NO: 2993 - protein, 123 aa, Artificial Sequence
  Description of Artificial Sequence: Synthetic polypeptide
EVQLVESGGGLVQPGGSLRLSCAASGSTFSINAMGWFRQAPGKEREFVAGITSSGGYTNYADSVKGRFTISADNSKNTAYLQMNSLKPEDTAVYYCAADGVPEYSDYASGPVWGQGTLVTVSS

SEQ ID NO: 2994 - protein, 124 aa, Artificial Sequence
  Description of Artificial Sequence: Synthetic polypeptide
EVQLLESGGGLVQPGGSLRLSCAASGFTFSNYAMRWVRQAPGKGLEWVSAISGSGGSTYYADSVRGRFTISRDNSKNTLYLQMNSLRAEDTAVYYCARHTGRYSSGSTGWFHYWGQGTLVTVSS

SEQ ID NO: 2995 - protein, 118 aa, Artificial Sequence
  Description of Artificial Sequence: Synthetic polypeptide
EVQLVESGGGLVQPGGSLRLSCAASGFAFSRHAMSWFRQAPGKEREFVSDIGGSGSTTYYADSVKGRFTISADNSKNTAYLQMNSLKPEDTAVYYCARTTFDNWFDPWGQGTLVTVSS

SEQ ID NO: 2996 - protein, 130 aa, Artificial Sequence
  Description of Artificial Sequence: Synthetic polypeptide
EVQLVESGGGLVQPGGSLRLSCAASGRTFSINAMGWFRQAPGKEREFVAGITRSAVSTITSEGTANYADSVKGRFTISADNSKNTAYLQMNSLKPEDTAVYYCAADGVPEYSDYASGPVWGQGTLVTVSS

SEQ ID NO: 2997 - protein, 118 aa, Artificial Sequence
  Description of Artificial Sequence: Synthetic polypeptide
EVQLLESGGGLVQPGESLRLSCAASGFTFSSYGMNWVRQAPGKGLEWVSASSGSGGSTYYADSVKGRFTISRDNSKNTLYLQMNSLRAEDTAYYCARREYIESGFDSWGQGTLVTVSS

SEQ ID NO: 2998 - protein, 123 aa, Artificial Sequence
  Description of Artificial Sequence: Synthetic polypeptide
EVQLVESGGGLVQPGGSLRLSCAASGRTFSTDAMGWFRQAPGKEREFVAAISSGGSTNYADSVKGRFTISADNSKNTAYLQMNSLKPEDTAVYYCAATRGRSTRLVLPSLVEWGQGTLVTVSS

SEQ ID NO: 2999 - protein, 127 aa, Artificial Sequence
  Description of Artificial Sequence: Synthetic polypeptide
EVQLVESGGGLVQPGGSLRLSCAASGRIFYPMGWFRQAPGKEREFVAAVRWSSTGIYYTQYADSVKGRFTISADNSKNTAYLQMNSLKPEDTAVYYCAAALSEVWRGSENLREGYDWGQGTLVTVSS

SEQ ID NO: 3000 - protein, 118 aa, Artificial Sequence
  Description of Artificial Sequence: Synthetic polypeptide
EVQLVESGGGLVQPGGSLRLSCAASGFTFGSYDMGWFRQAPGKEREFVTAINWSGARTAYADSVKGRFTISADNSKNTAYLQMNSLKPEDTAVYYCAARSVYSYEYNWGQGTLVTVSS

SEQ ID NO: 3001 - protein, 123 aa, Artificial Sequence
  Description of Artificial Sequence: Synthetic polypeptide
EVQLVESGGGLVQPGGSLRLSCAASGSTFTINAMGWFRQAPGKEREFVSGISHNGGTTNYADSVKGRFTISADNSKNTAYLQMNSLKPEDTAVYYCAADGVPEYSDYASGPVWGQGTLVTVSS

SEQ ID NO: 3002 - protein, 117 aa, Artificial Sequence; identical to SEQ ID NO: 62
  Description of Artificial Sequence: Synthetic polypeptide

SEQ ID NO: 3003 - protein, 111 aa, Artificial Sequence
  Description of Artificial Sequence: Synthetic polypeptide
EVQLVESGGGLVQPGGSLRLSCAASGRTYAMGWFRQAPGKEREFVAEINWSGSSTYYADSVKGRFTISADNSKNTAYLQMNSLKPEDTAVYYCAVDGPFGWGQGTLVTVSS

SEQ ID NO: 3004 - protein, 122 aa, Artificial Sequence
  Description of Artificial Sequence: Synthetic polypeptide
EVQLVESGGGLVQPGGSLRLSCAASGLPFSTKSMGWFRQAPGKEREFVAAIHWSGLTSYADSVKGRFTISADNSKNTAYLQMNSLKPEDTAVYYCAADRAADFFAQRDEYDWGQGTLVTVSS

SEQ ID NO: 3005 - protein, 114 aa, Artificial Sequence
  Description of Artificial Sequence: Synthetic polypeptide
EVQLVESGGGLVQPGGSLRLSCAASGRTIVPYTMGWFRQAPGKEREFVAAISPSAFTEYADSVKGRFTISADNSKNTAYLQMNSLKPEDTAVYYCAARRWGYDWGQGTLVTVSS

SEQ ID NO: 3006 - protein, 114 aa, Artificial Sequence
  Description of Artificial Sequence: Synthetic polypeptide
EVQLVESGGGLVQPGGSLRLSCAASGLRLNMHRMGWFRQAPGKEREFVAAISGWSGGTNYADSVKGRFTISADNSKNTAYLQMNSLKPEDTAVYYCAKIGTLWWGQGTLVTVSS

SEQ ID NO: 3007 - protein, 122 aa, Artificial Sequence
  Description of Artificial Sequence: Synthetic polypeptide
EVQLVESGGGLVQPGGSLRLSCAASGSTFSINAMGWFRQAPGKEREFVAGISRGGTTNYADSVKGRFTISADNSKNTAYLQMNSLKPEDTAVYYCAADGVPEYSDYASGPVWGQGTLVTVSS

SEQ ID NO: 3008 - protein, 119 aa, Artificial Sequence
  Description of Artificial Sequence: Synthetic polypeptide
EVQLVESGGGLVQPGGSLRLSCAASGSTLPYHAMGWFRQAPGKEREFVASISRFFGTAYYADSVKGRFTISADNSKNTAYLQMNSLKPEDTAVYYCAPTFAAGASEYHWGQGTLVTVSS

SEQ ID NO: 3009 - protein, 119 aa, Artificial Sequence
  Description of Artificial Sequence: Synthetic polypeptide
EVQLVESGGGLVQPGGSLRLSCAASGFTFTSYAISWFRQAPGKEREFVSAISGSGGSTDYADSVKGRFTISADNSKNTAYLQMNSLKPEDTAVYYCARGAYGSGTYDYWGQGTLVTVSS

SEQ ID NO: 3010 - protein, 117 aa, Artificial Sequence
  Description of Artificial Sequence: Synthetic polypeptide
EVQLVESGGGLVQPGGSLRLSCAASGFSLDYYGMGWFRQAPGKEREFVAAITSGGTPHYADSVKGRFTISADNSKNTAYLQMNSLKPEDTAVYYCASAYNPGIGYDWGQGTLVTVSS

SEQ ID NO: 3011 - protein, 116 aa, Artificial Sequence
  Description of Artificial Sequence: Synthetic polypeptide
EVQLVESGGGLVQPGGSLRLSCAASGLTDRRYTMGWFRQAPGKEREFVASITLGGSTAYADSVKGRFTISADNSKNTAYLQMNSLKPEDTAVYYCAKEDVGKPFDWGQGTLVTVSS

SEQ ID NO: 3012 - protein, 116 aa, Artificial Sequence
  Description of Artificial Sequence: Synthetic polypeptide
EVQLVESGGGLVQPGGSLRLSCAASGRTFRRYTMGWFRQAPGKEREFVASITSSGVNAYADSVKGRFTISADNSKNTAYLQMNSLKPEDTAVYYCAKEDVGKPFDWGQGTLVTVSS

SEQ ID NO: 3013 - protein, 117 aa, Artificial Sequence
  Description of Artificial Sequence: Synthetic polypeptide
EVQLVESGGGLVQPGGSLRLSCAASGPTFSIYAMGWFRQAPGKEREFVAGISWNGGSTNYADSVKGRFTISADNSKNTAYLQMNSLKPEDTAVYYCALRRRFGGQEWGQGTLVTVSS

SEQ ID NO: 3014 - protein, 116 aa, Artificial Sequence
  Description of Artificial Sequence: Synthetic polypeptide
EVQLVESGGGLVQPGGSLRLSCAASGRTISRYTMGWFRQAPGKEREFVASITSGGSTAYADSVKGRFTISADNSKNTAYLQMNSLKPEDTAVYYCAKEDVGKPFDWGQGTLVTVSS

SEQ ID NO: 3015 - protein, 116 aa, Artificial Sequence
  Description of Artificial Sequence: Synthetic polypeptide
EVQLVESGGGLVQPGGSLRLSCAASGRTITRYTMGWFRQAPGKEREFVASITSGGSTAYADSVKGRFTISADNSKNTAYLQMNSLKPEDTAVYYCAKQDVGKPFDWGQGTLVTVSS

SEQ ID NO: 3016 - protein, 114 aa, Artificial Sequence
  Description of Artificial Sequence: Synthetic polypeptide
EVQLVESGGGLVQPGGSLRLSCAASGFTFENHAMGWFRQAPGKEREFVAEIYPSGSTIYADSVKGRFTISADNSKNTAYLQMNSLKPEDTAVYYCAARILSRNWGQGTLVTVSS

SEQ ID NO: 3017 - protein, 135 aa, Artificial Sequence
  Description of Artificial Sequence: Synthetic polypeptide
EVQLVESGGGLVQPGGSLRLSCAASGFTFSRHAMNWFRQAPGKEREFVSTITGSGGSTNYADSVKGRFTISADNSKNTAYLQMNSLKPEDTAVYYCAREVGLYYYGSGSSSRRLLGRIDYYFDYWGQGTLVTVSS

SEQ ID NO: 3018 - protein, 116 aa, Artificial Sequence
  Description of Artificial Sequence: Synthetic polypeptide
EVQLVESGGGLVQPGGSLRLSCAASGFTFDDYSMGWFRQAPGKEREFVASIEWDGSTYYADSVKGRFTISADNSKNTAYLQMNSLKPEDTAVYYCAAFDGYTGSDWGQGTLVTVSS

SEQ ID NO: 3019 - protein, 123 aa, Artificial Sequence; identical to SEQ ID NO: 2993
  Description of Artificial Sequence: Synthetic polypeptide

SEQ ID NO: 3020 - protein, 111 aa, Artificial Sequence
  Description of Artificial Sequence: Synthetic polypeptide
EVQLVESGGGLVQPGGSLRLSCAASGQTFNMGWFRQAPGKEREFVAEINWSGSSTYYADSVKGRFTISADNSKNTAYLQMNSLKPEDTAVYYCAVDGPFGWGQGTLVTVSS

SEQ ID NO: 3021 - protein, 118 aa, Artificial Sequence
  Description of Artificial Sequence: Synthetic polypeptide
EVQLVESGGGLVQPGGSLRLSCAASGNTFSDNPMGWFRQAPGKEREFVAILAWDSGSTYYADSVKGRFTISADNSKNTAYLQMNSLKPEDTAVYYCTTDYSKLAITKLSYWGQGTLVT

SEQ ID NO: 3022 - protein, 117 aa, Artificial Sequence
  Description of Artificial Sequence: Synthetic polypeptide
EVQLVESGGGLVQPGGSLRLSCAASGRTHSIYPMGWFRQAPGKEREFVASITSYGDTNYADSVKGRFTISADNSKNTAYLQMNSLKPEDTAVYYCAARRWIPPGPIWGQGTLVTVSS

SEQ ID NO: 3023 - protein, 120 aa, Artificial Sequence
  Description of Artificial Sequence: Synthetic polypeptide
EVQLVESGGGLVQPGGSLRLSCAASGRTFSMHAMGWFRQAPGKEREFVASISSQGRTNYADSVKGRFTISADNSKNTAYLQMNSLKPEDTAVYYCAAEVRNGSDYLPIDWGQGTLVTVSS

SEQ ID NO: 3024 - protein, 118 aa, Artificial Sequence
  Description of Artificial Sequence: Synthetic polypeptide
EVQLVESGGGLVQPGGSLRLSCAASGFTFSNYSMGWFRQAPGKEREFVAAIHWNGDSTAYADSVKGRFTISADNSKNTAYLQMNSLKPEDTAVYYCAAQTEDSAQYIWGQGTLVTVSS

SEQ ID NO: 3025 - protein, 122 aa, Artificial Sequence
  Description of Artificial Sequence: Synthetic polypeptide
EVQLVESGGGLVQPGGSLRLSCAASGSTFSVNAMGWFRQAPGKEREFVAGVTRGGYTNYADSVKGRFTISADNSKNTAYLQMNSLKPEDTAVYYCAADGVPEYSDYASGPVWGQGTLVTVSS

SEQ ID NO: 3026 - protein, 122 aa, Artificial Sequence
  Description of Artificial Sequence: Synthetic polypeptide
EVQLVESGGGLVQPGGSLRLSCAASGSIGSINAMGWFRQAPGKEREFVAGISNGGTTNYADSVKGRFTISADNSKNTAYLQMNSLKPEDTAVYYCAADGVPEYSDYASGPVWGQGTLVTVSS

SEQ ID NO: 3027 - protein, 124 aa, Artificial Sequence
  Description of Artificial Sequence: Synthetic polypeptide
EVQLVESGGGLVQPGGSLRLSCAASGRTFGSYDMGWFRQAPGKEREFVAFIHRSGGSTYYADSVKGRFTISADNSKNTAYLQMNSLKPEDTAVYYCATFPAIVTDSDYDLGNDWGQGTLVTVSS

SEQ ID NO: 3028 - protein, 125 aa, Artificial Sequence; identical to SEQ ID NO: 2988
  Description of Artificial Sequence: Synthetic polypeptide

SEQ ID NO: 3029 - protein, 118 aa, Artificial Sequence
  Description of Artificial Sequence: Synthetic polypeptide
EVQLVESGGGLVQPGGSLRLSCAASGFGFGSYDMGWFRQAPGKEREFVTAINWSGARAYYADSVKGRFTISADNSKNTAYLQMNSLKPEDTAVYYCAARSVYSYDYNWGQGTLVTVSS

SEQ ID NO: 3030 - protein, 123 aa, Artificial Sequence
  Description of Artificial Sequence: Synthetic polypeptide
EVQLVESGGGLVQPGGSLRLSCAASGSTLSINAMGWFRQAPGKEREFVAGITRSGSVTNYADSVKGRFTISADNSKNTAYLQMNSLKPEDTAVYYCAADGVPEYSDYASGPVWGQGTLVTVSS

SEQ ID NO: 3031 - protein, 123 aa, Artificial Sequence
  Description of Artificial Sequence: Synthetic polypeptide
EVQLVESGGGLVQPGGSLRLSCAASGRPFSEYTMGWFRQAPGKEREFVSSIHWGGRGTNYADSVKGRFTISADNSKNTAYLQMNSLKPEDTAVYYCAAELHSSDYTSPGAYAWGQGTLVTVSS

SEQ ID NO: 3032 - protein, 122 aa, Artificial Sequence
  Description of Artificial Sequence: Synthetic polypeptide
EVQLVESGGGLVQPGGSLRLSCAASGRTFSNYPMGWFRQAPGKEREFVAAITWSGDSTNYADSVKGRFTISADNSKNTAYLQMNSLKPEDTAVYYCALPSNIITTDYLRVYWGQGTLVTVSS

SEQ ID NO: 3033 - protein, 116 aa, Artificial Sequence
  Description of Artificial Sequence: Synthetic polypeptide
EVQLVESGGGLVQPGGSLRLSCAASGRTFRRYTMGWFRQAPGKEREFVASITKFGSTNYADSVKGRFTISADNSKNTAYLQMNSLKPEDTAVYYCAKEDVGKPFDWGQGTLVTVSS

SEQ ID NO: 3034 - protein, 116 aa, Artificial Sequence
  Description of Artificial Sequence: Synthetic polypeptide
EVQLVESGGGLVQPGGSLRLSCAASGRTFSTYVMGWFRQAPGKEREFVASISSRGITHYADSVKGRFTISADNSKNTAYLQMNSLKPEDTAVYYCAKEDVGKPFDWGQGTLVTVSS

SEQ ID NO: 3035 - protein, 117 aa, Artificial Sequence
  Description of Artificial Sequence: Synthetic polypeptide
EVQLVESGGGLVQPGGSLRLSCAASGFTLDYYGMGWFRQAPGKEREFVAAITSGGTPHYGDSVKGRFTISADNSKNTAYLQMNSLKPEDTAVYYCASAYNPGIGYDWGQGTLVTVSS

SEQ ID NO: 3036 - protein, 125 aa, Artificial Sequence
  Description of Artificial Sequence: Synthetic polypeptide
EVQLVESGGGLVQPGGSLRLSCAASGFTFGHYAMGWFRQAPGKEREFVAAVSWSGSTTYYADSVKGRFTISADNSKNTAYLQMNSLKPEDTAVYYCAVSHPLNYYTYYDARRYDWGQGTLVTVSS

SEQ ID NO: 3037 - protein, 124 aa, Artificial Sequence
  Description of Artificial Sequence: Synthetic polypeptide
EVQLVESGGGLVQPGGSLRLSCAASGFTFEDYAMGWFRQAPGKEREGVAAITRGSNTTDYADSVKGRFTISADNSKNTAYLQMNSLKPKDTAVYYCAARRWMGGSYFDPGNYDWGQGTLVTVSS

SEQ ID NO: 3038 - protein, 116 aa, Artificial Sequence
  Description of Artificial Sequence: Synthetic polypeptide
EVQLVESGGGLVQPGGSLRLSCAASGRTLSRYTMGWFRQAPGKEREFVASITSGGSTNYADSVKGRFTISADNSKNTAYLQMNSLKPEDTAVYYCAKEDVGKPFDWGQGTLVTVSS

SEQ ID NO: 3039 - protein, 128 aa, Artificial Sequence
  Description of Artificial Sequence: Synthetic polypeptide
EVQLVESGGGLVQPGGSLRLSCAASGRTFASYAMGWFRQAPGKEREFVGAISRSGDSTYYADSVKGRFTISADNSKNTAYLQMNSLKPEDTAVYYCARAPFYCTTTKCQDNYYYMDVWGQGTLVTVSS

SEQ ID NO: 3040 - protein, 122 aa, Artificial Sequence
  Description of Artificial Sequence: Synthetic polypeptide
EVQLVESGGGLVQPGGSLRLSCAASGGTYHAMGWFRQAPGKEREFVAGITSDDRTNYADSVKGRFTISADNSKNTAYLQMNSLKPEDTAVYYCARERRYYDSSGYPYYFDYWGQGTLVTVSS

SEQ ID NO: 3041 - protein, 119 aa, Artificial Sequence
  Description of Artificial Sequence: Synthetic polypeptide
EVQLVESGGGLVQPGGSLRLSCAASGTTLDYYAMGWFRQAPGKEREFVAAISWSGGSTAYADSVKGRFTISADNSKNTAYLQMNSLKPEDTAVYYCAREDYYDSSGYSWGQGTLVTVSS

SEQ ID NO: 3042 - protein, 118 aa, Artificial Sequence
  Description of Artificial Sequence: Synthetic polypeptide
EVQLVESGGGLVQPGGSLRLSCAASGGTLSRSRMGWFRQAPGKEREFVAFIGSDTLYADSVKGRFTISADNSKNTAYLQMNSLKPEDTAVYYCANLAYYDSSGYYDYWGQGTLVTVSS

SEQ ID NO: 3043 - protein, 124 aa, Artificial Sequence
  Description of Artificial Sequence: Synthetic polypeptide
EVQLVESGGGLVQPGGSLRLSCAASGGTFSFYNMGWFRQAPGKEREFVAFISGNGGTSYADSVKGRFTISADNSKNTAYLQMNSLKPEDTAVYYCAVVAMRMVTTEGPDVLDVWGQGTLVTVSS

SEQ ID NO: 3044 - protein, 114 aa, Artificial Sequence
  Description of Artificial Sequence: Synthetic polypeptide
EVQLVESGGGLVQPGGSLRLSCAASGFTFDYYAMGWFRQAPGKEREFVSAIDSEGRTSYADSVKGRFTISADNSKNTAYLQMNSLKPEDTAVYYCARWGPFDIWGQGTLVTVSS

SEQ ID NO: 3045 - protein, 122 aa, Artificial Sequence
  Description of Artificial Sequence: Synthetic polypeptide
EVQLVESGGGLVQPGGSLRLSCAASGFPFSIWPMGWFRQAPGKEREFVAAVRWSSTGIYYTQYADSVKGRFTISADNSKNTAYLQMNSLKPEDTAVYYCTRSEYSSGWYDYWGQGTLVTVSS

SEQ ID NO: 3046 - protein, 127 aa, Artificial Sequence
  Description of Artificial Sequence: Synthetic polypeptide
EVQLVESGGGLVQPGGSLRLSCAASGFAESSSMGWFRQAPGKEREFVAAISWSGDITIYADSVKGRFTISADNSKNTAYLQMNSLKPEDTAVYYCARGAPYFDHGSKSYRLFYFDYWGQGTLVTVSS

SEQ ID NO: 3047 - protein, 125 aa, Artificial Sequence
  Description of Artificial Sequence: Synthetic polypeptide
EVQLVESGGGLVQPGGSLRLSCAASGFTFGTTTMGWFRQAPGKEREFVAAISWSTGIAHYADSVKGRFTISADNSKNTAYLQMNSLKPEDTAVYYCARGGPNYYASGRYPWFDPWGQGTLVTVSS

SEQ ID NO: 3048 - protein, 125 aa, Artificial Sequence
  Description of Artificial Sequence: Synthetic polypeptide
EVQLVESGGGLVQPGGSLRLSCAASGFIGNYHAMGWFRQAPGKEREFVAAVTWSGGTTNYADSVKGRFTISADNSKNTAYLQMNSLKPEDTAVYYCAREGYYYDSSGYPYYFDYWGQGTLVTVSS

SEQ ID NO: 3049 - protein, 126 aa, Artificial Sequence
  Description of Artificial Sequence: Synthetic polypeptide
EVQLLESGGGLVQPGGSLRLSCAASGFTFSNYATDWVRQAPGKGLEWVSIISGSGGATYYADSVKGRFTISRDNSKNTLYLQMNSLRAEDTAVYYCAKGGYCSSDTCWWEYWLDPWGQGTLVTVSS

SEQ ID NO: 3050 - protein, 122 aa, Artificial Sequence
  Description of Artificial Sequence: Synthetic polypeptide
EVQLLESGGGLVQPGGSLRLSCAASGFTFSAFAMGWVRQAPGKGLEWVSAITASGDITYYADSVKGRFTISRDNSKNTLYLQMNSLRAEDTAVYYCARQSDGLPSPWHFDLGGQGTLVTVSS

SEQ ID NO: 3051 - protein, 122 aa, Artificial Sequence; identical to SEQ ID NO: 14
  Description of Artificial Sequence: Synthetic polypeptide

SEQ ID NO: 3052 - protein, 129 aa, Artificial Sequence; identical to SEQ ID NO: 8
  Description of Artificial Sequence: Synthetic polypeptide

SEQ ID NO: 3053 - protein, 122 aa, Artificial Sequence; identical to SEQ ID NO: 14
  Description of Artificial Sequence: Synthetic polypeptide

SEQ ID NO: 3054 - protein, 117 aa, Artificial Sequence; identical to SEQ ID NO: 2
  Description of Artificial Sequence: Synthetic polypeptide

SEQ ID NO: 3055 - protein, 122 aa, Artificial Sequence
  Description of Artificial Sequence: Synthetic polypeptide
EVQLLESGGGLVQPGGSLRLSCAASGFTFSDFAMAWVRQAPGKGLEWVSAITGSGDITYYADSVKGRFTISRDNSKNTLYLQMNSLRAEDTAVYYCAREADGLHSPWHFDLWGQGTLVTVSS

SEQ ID NO: 3056 - protein, 117 aa, Artificial Sequence
  Description of Artificial Sequence: Synthetic polypeptide
EVQLLESGGGLVQPGGSLRLSCAASGFTFSDYPMNWVRQAPGKGLEWVSTISGSGGITFYADSVKGRFTISRDNSKNTLYLQMNSLRAEDTAVYYCVRHDEYSFDYWGQGTLVTVSS

SEQ ID NO: 3057 - protein, 117 aa, Artificial Sequence
  Description of Artificial Sequence: Synthetic polypeptide
EVQLLESGGGLVQPGGSLRLSCAASGFTFSDYPMNWVRQAPGKGLEWVSAISGSGDNTYYADSVKGRFTISRDNSKNTLYLQMNSLRAEDTAVYYCVRHDEYSFDYWGQGTLVTVSS

SEQ ID NO: 3058 - protein, 117 aa, Artificial Sequence
  Description of Artificial Sequence: Synthetic polypeptide
EVQLLESGGGLVQPGGSLRLSCAASGFTFSDFAMAWVRQAPGKGLEWVSAITGTGDITYYADSVKGRFTISRDNSKNTLYLQMNSLRAEDTAVYYCAREADGLHSPWGQGTLVTVSS

SEQ ID NO: 3059 - protein, 117 aa, Artificial Sequence
  Description of Artificial Sequence: Synthetic polypeptide
EVQLLESGGGLVQPGGSLRLSCAASGFTFSDYPMNWVRQAPGKGLEWVSAITGSGDITYYADSVKGRFTISRDNSKNTLYLQMNSLRAEDTAVYYCVRHDEYSFDYWGQGTLVTVSS

SEQ ID NO: 3060 - protein, 122 aa, Artificial Sequence; identical to SEQ ID NO: 14
  Description of Artificial Sequence: Synthetic polypeptide

SEQ ID NO: 3061 - protein, 122 aa, Artificial Sequence; identical to SEQ ID NO: 14
  Description of Artificial Sequence: Synthetic polypeptide

SEQ ID NO: 3062 - protein, 116 aa, Artificial Sequence
  Description of Artificial Sequence: Synthetic polypeptide
EVQLLESGGGLVQPGGSLRLSCAASGFTFPRYAMSWVRQAPGKGLEWVSTISGSGSTTYYADSVKGRFTISRDNSKNTLYLQMNSLRAEDTAVYYCARLIDAFDIWGQGTLVTVSS

SEQ ID NO: 3063 - protein, 116 aa, Artificial Sequence; identical to SEQ ID NO: 3062
  Description of Artificial Sequence: Synthetic polypeptide

SEQ ID NO: 3064 - protein, 122 aa, Artificial Sequence
  Description of Artificial Sequence: Synthetic polypeptide
EVQLLESGGGLVQPGGSLRLSCAASGFTFTTYALSWVRQAPGKGLEWVSGISGSGDETYYADSVKGRFTISRDNSKNTLYLQMNSLRAEDTAVYYCTTGDDFWSGGNWFDPWGQGTLVTVSS

SEQ ID NO: 3065 - protein, 129 aa, Artificial Sequence; identical to SEQ ID NO: 6
  Description of Artificial Sequence: Synthetic polypeptide

SEQ ID NO: 3066 - protein, 120 aa, Artificial Sequence
  Description of Artificial Sequence: Synthetic polypeptide
EVQLLESGGGLVQPGGSLRLSCAASGFVFSSYAMSWVRQAPGKGLEWVSAISGSGGSSYYADSVKGRFTISRDNSKNTLYLQMNSLRAEDTAVYYCARVGGGYWYGIDVWGQGTLVTVSS

SEQ ID NO: 3067 - protein, 122 aa, Artificial Sequence
  Description of Artificial Sequence: Synthetic polypeptide
EVQLLESGGGLVQPGGSLRLSCAASGFTLSSYVMSWVRQAPGKGLEWVSGISGGGASTYYADSVKGRFTISRDNSKNTLYLQMNSLRAEDTAVYYCARGYSRNWYPSWFDPWGQGTLVTVSS

SEQ ID NO: 3068 - protein, 115 aa, Artificial Sequence
  Description of Artificial Sequence: Synthetic polypeptide
EVQLLESGGGLVQPGGSLRLSCAASGFTFSTYAMSWVRQAPGKGLEWVSSIGGSGSTTYYADSVKGRFTISRDNSKNTLYLQMNSLRAEDTAVYYCAGGWYLDYWGQGTLVTVSS

SEQ ID NO: 3069 - protein, 118 aa, Artificial Sequence
  Description of Artificial Sequence: Synthetic polypeptide
EVQLLGSGGGLVQPGGSLRLSCAASGFTYSNYAMTWVRQAPGKGLEWVSAISGSSGSTYYADSVKGRFTISRDNSKNTLYLQMNSLRAEDTAVYYCASLCIVDPFDIWGQGTLVTVSS

SEQ ID NO: 3070 - protein, 117 aa, Artificial Sequence; identical to SEQ ID NO: 2
  Description of Artificial Sequence: Synthetic polypeptide

SEQ ID NO: 3071 - protein, 126 aa, Artificial Sequence
  Description of Artificial Sequence: Synthetic polypeptide
EVQLLESGGGLVQPGGSLRLSCAASGFTFRSHAMSWVRQAPGKGLEWVSSISGGGASTYYADSVKGRFTISRDNSKNTLYLQMNSLRAEDTAVYYCARVKYLTTSSGWPRPYFDNWGQGTLVTVSS

SEQ ID NO: 3072 - protein, 121 aa, Artificial Sequence
  Description of Artificial Sequence: Synthetic polypeptide
EVQLLESGGGLVQPGGSLRLSCAASGFTFSAYSMSWVRQAPGKGLEWVSAISGSGGSRYYADSVKGRFTISRDNSKNTLYLQMNSLRAEDTAVYYCGRSKWPQANGAFDIWGQGTLVTVSS

SEQ ID NO: 3073 - protein, 123 aa, Artificial Sequence
  Description of Artificial Sequence: Synthetic polypeptide
EVQLLESGGGLVQPGGSLRLSCAASGFMFGNYAMSWVRQAPGKGLEWVAAISGSGGSTYYADSVKGRFTISRDNSKNTLYLQMNSLRAEDTAVYYCAKDRGYSSSWYGGFDYWGQGTLVTVSS

SEQ ID NO: 3074 - protein, 122 aa, Artificial Sequence
  Description of Artificial Sequence: Synthetic polypeptide
EVQLLESGGGLVQPGGSLRLSCAASGFTFRNHAMAWVRQAPGKGLEWVSGISGSGGTTYYGDSVKGRFTISRDNSKNTLYLQMNSLRAEDTAVYYCARGTRFLQWSLPLDVWGQGTLVTVSS

SEQ ID NO: 3075 - protein, 121 aa, Artificial Sequence
  Description of Artificial Sequence: Synthetic polypeptide
EVQLLESGGGLVQPGGSLRLSCAASGFTIPNYAMSWVRQAPGKGLEWVSGISGAGASTYYADSVKGRFTISRDNSKNTLYLQMNSLRAEDTAVYYCARHTWWKGAGFFDHWGQGTLVTVSS

SEQ ID NO: 3076 - protein, 122 aa, Artificial Sequence
  Description of Artificial Sequence: Synthetic polypeptide
EVQLLESGGGLVQPGGSLRLSCAASGFTFRNYAMAWVRQAPGKGLEWVSGISGSGGTTYYGDSVKGRFTISRDNSKNTLYLQMNSLRAEDTAVYYCARGTRFLEWSLPLDVWGQGTLVTVSS

SEQ ID NO: 3077 - protein, 126 aa, Artificial Sequence
  Description of Artificial Sequence: Synthetic polypeptide
EVQLLESGGGLVQPGGSLRLSCAASGFTIRNYAMSWVRQAPGKGLEWVSSISGGGASTYYADSVKGRFTISRDNSKNTLYLQMNSLRAEDTAVYYCARVKYLTTSSGWPRPYFDNWGQGTLVTVSS

SEQ ID NO: 3078 - protein, 121 aa, Artificial Sequence
  Description of Artificial Sequence: Synthetic polypeptide
EVQLLESGGGLVQPGGSLRLSCAASGFTIPNYAMSWVRQAPGKGLEWVSGISGSGASTYYADSVKGRFTISRDNSKNTLYLQMNSLRAEDTAVYYCARHTWWKGAGFFDHWGQGTLVTVSS

SEQ ID NO: 3079 - protein, 121 aa, Artificial Sequence
  Description of Artificial Sequence: Synthetic polypeptide
EVQLLESGGGLVQPGGSLRLSCAASGFTITNYAMSWVRQAPGKGLEWVSGISGSGAGTYYADSVKGRFTISRDNSKNTLYLQMNSLRAEDTAVYYCARHAWWKGAGFFDHWGQGTLVTVSS

SEQ ID NO: 3080 - protein, 126 aa, Artificial Sequence; identical to SEQ ID NO: 3071
  Description of Artificial Sequence: Synthetic polypeptide

SEQ ID NO: 3081 - protein, 121 aa, Artificial Sequence
  Description of Artificial Sequence: Synthetic polypeptide
EVQLLESGGGLVQPGGSLRLSCAASGFTITNYAMSWVRQAPGKGLEWVSGISGSGASTYYADSVKGRFTISRDNSKNTLYLQMNSLRAEDTAVYYCARHTWWKGAGFFDHWGQGTLVTVSS

SEQ ID NO: 3082 - protein, 123 aa, Artificial Sequence
  Description of Artificial Sequence: Synthetic polypeptide
EVQLLESGGGLVQPGGSLRLSCAASGFTFRSHAMNWVRQAPGKGLEWVSAISGSGGSTNYADSVKGRFTISRDNSKNTLYLQMNSLRAEDTAVYYCARGLKFLEWLPSAFDIWGQGTLVTVSS

SEQ ID NO: 3083 - protein, 126 aa, Artificial Sequence; identical to SEQ ID NO: 3071
  Description of Artificial Sequence: Synthetic polypeptide

SEQ ID NO: 3084 - protein, 126 aa, Artificial Sequence
  Description of Artificial Sequence: Synthetic polypeptide
EVQLLESGGGLVQPGGSLRLSCAASGFTFRSYAMSWVRQAPGKGLEWVSSISGGGASTYYADSVKGRFTISRDNSKNTLYLQMNSLRAEDTAVYYCARVKYLTTSSGWPRPYFDNWGQGTLVTVSS

SEQ ID NO: 3085 - protein, 121 aa, Artificial Sequence
  Description of Artificial Sequence: Synthetic polypeptide
EVQLLESGGGLVQPGGSLRLSCAASGFTITNYAMSWVRQAPGKGLEWVSGISGSGAGTYYADSVKGRFTISRDNSKNTLYLQMNSLRAEDTAVYYCARHTWWKGAGFFDHWGQGTLVTVSS

SEQ ID NO: 3086 - protein, 123 aa, Artificial Sequence
  Description of Artificial Sequence: Synthetic polypeptide
EVQLLESGGGLVQPGGSLRLSCAASGFTFTNFAMSWVRQAPGKGLEWVSAISGRGGGTYYADSVKGRFTISRDNSKNTLYLQMNSLRAEDTAVYYCARDAHGYYYDSSGYDDWGQGTLVTVSS

SEQ ID NO: 3087 - protein, 120 aa, Artificial Sequence
  Description of Artificial Sequence: Synthetic polypeptide
EVQLLESGGGLVQPGGSLRLSCAASGFTFRSYPMSWVRQAPGKGLEWVSTISGSGGITYYADSVKGRFTISRDNSKNTLYLQMNSLRAEDTAVYYCAKGVYGSTVTTCHWGQGTLVTVSS

SEQ ID NO: 3088 - protein, 117 aa, Artificial Sequence
  Description of Artificial Sequence: Synthetic polypeptide
EVQLLESGGGLVQPGGSLRLSCAASGFTLTSYAMSWVRQAPGKGLEWVSAISGSGVDTYYADSVKGRFTISRDNSKNTLYLQMNSLRAEDTAVYYCARPTNWGFDYWGQGTLVTVSS

SEQ ID NO: 3089 - protein, 119 aa, Artificial Sequence
  Description of Artificial Sequence: Synthetic polypeptide
EVQLLESGGGLVQPGGSLRLSCAASGFTFINYAMSWVRQAPGKGLEWVSTISTSGGNTYYADSVKGRFTISRDNSKNTLYLQMNSLRAEDTAVYYCARADSNWASSAYWGQGTLVTVSS

SEQ ID NO: 3090 - protein, 124 aa, Artificial Sequence
  Description of Artificial Sequence: Synthetic polypeptide
EVQLLESGGGLVQPGGSLRLSCAASGFPFSTYAMSWVRQAPGKGLEWVSGISVSGGFTYYADSVKGRFTISRDNSKNTLYLQMNSLRAEDTAVYYCARDPYSYGYYYYYGMDVWGQGTLVTVSS

SEQ ID NO: 3091 - protein, 118 aa, Artificial Sequence
  Description of Artificial Sequence: Synthetic polypeptide
EVQLLESGGGLVQPGGSLRLSCAASGFTFSTYAMGWVRQAPGKGLEWVSGISGGGVSTYYADSVKGRFTISRDNSKNTLYLQMNSLRAEDTAVYYCARARNWGPSDYWGQGTLVTVSS

SEQ ID NO: 3092 - protein, 120 aa, Artificial Sequence
  Description of Artificial Sequence: Synthetic polypeptide
EVQLLESGGGLVQPGGSLRLSCAASGFIFSDYAMTWVRQAPGKGLEWVSAISGSAFYADSVKGRFTISRDNSKNTLYLQMNSLRAEDTAVYYCARDATYSSSWYNWFDPWGQGTLVTVSS

SEQ ID NO: 3093 - protein, 117 aa, Artificial Sequence
  Description of Artificial Sequence: Synthetic polypeptide
EVQLLESGGGLVQPGGSLRLSCAASGFTFSDYAMTWVRQAPGKGLEWVSDISGSGGSTYYADSVKGRFTISRDNSKNTLYLQMNSLRAEDTAVYYCARGTVTSFDFWGQGTLVTVSS

SEQ ID NO: 3094 - protein, 123 aa, Artificial Sequence
  Description of Artificial Sequence: Synthetic polypeptide
EVQLLESGGGLVQPGGSLRLSCAASGFTFSIYAMGWVRQAPGKGLEWVSFISGSGGSTYYADSVKGRFTISRDNSKNTLYLQMNSLRAEDTAVYYCAKDYHSASWFSAAADYWGQGTLVTVSS

SEQ ID NO: 3095 - protein, 123 aa, Artificial Sequence
  Description of Artificial Sequence: Synthetic polypeptide
EVQLLESGGGLVQPGGSLRLSCAASGFTFASYAMTWVRQAPGKGLEWVSAISESGGSTYYADSVKGRFTISRDNSKNTLYLQMNSLRAEDTAVYYCAREGQEYSSGSSYFDYWGQGTLVTVSS

SEQ ID NO: 3096 - protein, 126 aa, Artificial Sequence
  Description of Artificial Sequence: Synthetic polypeptide
EVQLLESGGGLVQPGGSLRLSCAASGFTFSEYAMSWVRQAPGKGLEWVSAITGSGGSTYYGDSVKGRFTISRDNSKNTLYLQMNSLRAEDTAVYYCARGSQTPYCGGDCPETFDYWGQGTLVTVSS

SEQ ID NO: 3097 - protein, 121 aa, Artificial Sequence
  Description of Artificial Sequence: Synthetic polypeptide
EVQLLESGGGLVQPGGSLRLSCAASGFTFDDYAMSWVRQAPGKGLEWVSGISGGGTSTYYADSVKGRFTISRDNSKNTLYLQMNSLRAEDTAVYYCARDLYSSGWYGFDYWGQGTLVTVSS

SEQ ID NO: 3098 - protein, 125 aa, Artificial Sequence
  Description of Artificial Sequence: Synthetic polypeptide
EVQLLESGGGLVQPGGSLRLSCAASGFTFNNYAMNWVRQAPGKGLEWVSAISGSVGSTYYADSVKGRFTISRDNSKNTLYLQMNSLRAEDTAVYYCARDNYDFWSGYYTNWFDPWGQGTLVTVSS

SEQ ID NO: 3099 - protein, 130 aa, Artificial Sequence
  Description of Artificial Sequence: Synthetic polypeptide
EVQLLESGGGLVQPGGSLRLSCAASGFTFTNHAMSWVRQAPGKGLEWVSAISGSGSNIYYADSVKGRFTISRDNSKNTLYLQMNSLRAEDTAVYYCARDSLSVTMGRGVVTYYYYGMDFWGQGTLVTVSS

SEQ ID NO: 3100 - protein, 116 aa, Artificial Sequence
  Description of Artificial Sequence: Synthetic polypeptide
EVQLVESGGGLVQPGGSLRLSCAASGPGTAIMGWFRQAPGKEREFVARISTSGGSTKYADSVKGRFTISADNSKNTAYLQMNSLKPEDTAVYYCARTTVTTPPLIWGQGTLVTVSS

SEQ ID NO: 3101 - protein, 116 aa, Artificial Sequence
  Description of Artificial Sequence: Synthetic polypeptide
EVQLVESGGGLVQPGGSLRLSCAASGRSFSNSVMGWFRQAPGKEREFVARITWNGGSTYYADSVKGRFTISADNSKNTAYLQMNSLKPEDTAVYYCATTENPNPRWGQGTLVTVSS

SEQ ID NO: 3102 - protein, 114 aa, Artificial Sequence
  Description of Artificial Sequence: Synthetic polypeptide
EVQLVESGGGLVQPGGSLRLSCAASGRTFGDDTMGWFRQAPGKEREFVAAVSWSGSGVYYADSVKGRFTITADNSKNTAYLQMNSLKPENTAVYYCATDPPLFWGQGTLVTVSS

SEQ ID NO: 3103 - protein, 116 aa, Artificial Sequence
  Description of Artificial Sequence: Synthetic polypeptide
EVQLVESGGGLVQPGGSLRLSCAASGRTFSDARMGWFRQAPGKEREFVGAVSWSGGTTVYADSVKGRFTISADNSKNTAYLQMNSLKPEDTAVYYCATTEDPYPRWGQGTLVTVSS

SEQ ID NO: 3104 - protein, 120 aa, Artificial Sequence
  Description of Artificial Sequence: Synthetic polypeptide
EVQLVESGGGLVQPGGSLRLSCAASGRTFGDYIMGWFRQAPGKERESVAAINWSAGYTAYADSVKGRFTISADNSKNTAYLQMNSLKPEDTAVYYCARASPNTGWHFDHWGQGTLVTVSS

SEQ ID NO: 3105 - protein, 118 aa, Artificial Sequence
  Description of Artificial Sequence: Synthetic polypeptide
EVQLVESGGGLVQPGGSLRLSCAASGSGLSINAMGWFRQAPGKERESVAAISWSGGSTYTAYADSVKGRFTISADNSKNTAYLQMNSLKPEDTAVYYCAAYQAGWGDWGQGTLVTVSS

SEQ ID NO: 3106 - protein, 116 aa, Artificial Sequence
  Description of Artificial Sequence: Synthetic polypeptide
EVQLVESGGGLVQPGGSLRLSCAASGRTFSNAAMGWFRQAPGKEREFVARILWTGASRNYADSVKGRFTISADNSKNTAYLQMNSLKPEDTAVYYCATTENPNPRWGQGTLVTVSS

SEQ ID NO: 3107 - protein, 120 aa, Artificial Sequence
  Description of Artificial Sequence: Synthetic polypeptide
EVQLVESGGGLVQPGGSLRLSCAASGFSLDYYGMGWFRQAPGKERESVAAISWNGDFTAYADSVKGRFTISADNSKNTAYLQMNSLKPEDTAVYYCAKRANPTGAYFDYWGQGTLVTVSS

SEQ ID NO: 3108 - protein, 125 aa, Artificial Sequence
  Description of Artificial Sequence: Synthetic polypeptide
EVQLVESGGGLVQPGGSLRLSCAASGFTFSRHDMGWFRQAPGKEREFVAGINWESGSTNYADSVKGRFTISADNSKNTAYLQMNSLKPEDTAVYYCAADRGVYGGRWYRTSQYTWGQGTLVTVSS

SEQ ID NO: 3109 - protein, 121 aa, Artificial Sequence
  Description of Artificial Sequence: Synthetic polypeptide
EVQLVESGGGLVQPGGSLRLSCAASGLTFRNYAMGWFRQAPGKEREFVAAIGSGGYTDYADSVKGRFTISADNSKNTAYLQMNSLKPEDTAVYYCAVKPGWVARDPSQYNWGQGTLVTVSS

SEQ ID NO: 3110 - protein, 117 aa, Artificial Sequence
  Description of Artificial Sequence: Synthetic polypeptide
EVQLVESGGGLVQPGGSLRLSCAASGGTFSRYAMGWFRQAPGKEREWVSAVDSGGSTYYADSVKGRFTISADNSKNTAYLQMNSLKPEDTAVYYCAASPSLRSAWQWGQGTLVTVSS

SEQ ID NO: 3111 - protein, 123 aa, Artificial Sequence
  Description of Artificial Sequence: Synthetic polypeptide
EVQLVESGGGLVQPGGSLRLSCAASGFTLDYYDMGWFRQAPGKEREFVAAVTWSGGSTYYADSVKGRFTISADNSKNTAYLQMNSLKPEDTAVYYCAADRRGLASTRAADYDWGQGTLVTVSS

SEQ ID NO: 3112 - protein, 120 aa, Artificial Sequence
  Description of Artificial Sequence: Synthetic polypeptide
EVQLVESGGGLVQPGGSLRLSCAASGRTFGDYIMGWFRQAPGKEREFVAAINWSAGYTPYADSVKGRFTISADNSKNTAYLQMNSLKPEDTAVYYCATAPPLFCWHFDLWGQGTLVTVSS

SEQ ID NO: 3113 - protein, 120 aa, Artificial Sequence
  Description of Artificial Sequence: Synthetic polypeptide
EVQLVESGGGLVQPGGSLRLSCAASGRTFGDDIMGWFRQAPGKEREFVAAIHWSAGYTRYADSVKGRFTISADNSKNTAYLQMNSLKPEDTAVYYCATDPPLFWGHVDLWGQGTLVTVSS

SEQ ID NO: 3114 - protein, 120 aa, Artificial Sequence
  Description of Artificial Sequence: Synthetic polypeptide
EVQLVESGGGLVQPGGSLRLSCAASGRTFGDYIMGWFRQAPGKEREIVAAINWSADYTPYADSVKGRFTISADNSKNTAYLQMNSLKPEDTAVYYCATAPPNTGWHFDHWGQGTLVTVSS

SEQ ID NO: 3115 - protein, 120 aa, Artificial Sequence
  Description of Artificial Sequence: Synthetic polypeptide
EVQLVESGGGLVQPGGSLRLSCAASGRTFGDYIMGWFRQAPGKEREIVAAINWSAGYTAYADSVKGRFTISADNSKNTAYLQMNSLKPEDTAVYYCATATPNTGWHFDHWGQGTLVTVSS

SEQ ID NO: 3116 - protein, 114 aa, Artificial Sequence
  Description of Artificial Sequence: Synthetic polypeptide
EVQLVESGGGLVQPGGSLRLSCAASGRTFSDDTMGWFRQAPGKEREFVAAINWSGGSTDYADSVKGRFTISADNSKNTAYLQMNSLKPEDTAVYYCATDPPLFWGQGTLVTVSS

SEQ ID NO: 3117 - protein, 114 aa, Artificial Sequence
  Description of Artificial Sequence: Synthetic polypeptide
EVQLVESGGGLVQPGGSLRLSCAASGRTFGDDTMGWFRQAPGKEREFVAGINWSGGNTYYADSVKGRFTISADNSKNTAYLQMNSLKPEDTAVYYCATDPPLFWGQGTLVTVSS

SEQ ID NO: 3118 - protein, 114 aa, Artificial Sequence
  Description of Artificial Sequence: Synthetic polypeptide
EVQLVESGGGLVQPGGSLRLSCAASGRTFGDYIMGWFRQAPGKEREFVAAINWTGGYTSYADSVKGRFTISADNSKNTAYLQMNSLKPEDTAVYYCATDPPLFWGQGTLVTVSS

SEQ ID NO: 3119 - protein, 114 aa, Artificial Sequence
  Description of Artificial Sequence: Synthetic polypeptide
EVQLVESGGGLVQPGGSLRLSCAASGRTFGDDTMGWFRQAPGKERECVAAINWSGGNTYYADSVKGRFTISADNSKNTAYLQMNSLKPEDTAVYYCATDPPLFWGQGTLVTVSS

SEQ ID NO: 3120 - protein, 114 aa, Artificial Sequence
  Description of Artificial Sequence: Synthetic polypeptide
EVQLVESGGGLVQPGGSLRLSCAASGRTFSDYTMGWFRQAPGKEREFVAAINWSGGYTYYADSVKGRFTISADNSKNTAYLQMNSLKPEDTAVYYCATDPPLFWGQGTLVTVSS

SEQ ID NO: 3121 - protein, 128 aa, Artificial Sequence
  Description of Artificial Sequence: Synthetic polypeptide
EVQLVESGGGLVQPGGSLRLSCAASGRTFGDYGMGWFRQAPGKEREFVATINWSGALTHYADSVKGRFTISADNSKNTAYLQMNSLKPEDTAVYYCATLPFYDFWSGYYTGYYYMDVWGQGTLVTVSS

SEQ ID NO: 3122 - protein, 114 aa, Artificial Sequence
  Description of Artificial Sequence: Synthetic polypeptide
EVQLVESGGGLVQPGGSLRLSCAASGRTFSDDTMGWFRQAPGKEREFLAGVTWSGSSTFYADSVKGRFTISADNSKNTAYLQMNSLKPEDTAVYYCATDPPLFWGQGTLVTVSS

SEQ ID NO: 3123 - protein, 114 aa, Artificial Sequence
  Description of Artificial Sequence: Synthetic polypeptide
EVQLVESGGGLVQPGGSLRLSCAASGRTFSDDIMGWFRQAPGKEREFVAAISWSGGNTHYADSVKGRFTISADNSKNTAYLQMNSLKPEDTAVYYCATDPPLFWGQGTLVTVSS

SEQ ID NO: 3124 - protein, 120 aa, Artificial Sequence
  Description of Artificial Sequence: Synthetic polypeptide
EVQLVESGGGLVQPGGSLRLSCAASGRTFGDYIMGWFRQAPGKERESVAAINWSAGYTAYADSVKGRFTISADNSKNTAYLQMNSLKPEDTAVYYCATASPNTGWHFDHWGQGTLVTVSS

SEQ ID NO: 3125 - protein, 124 aa, Artificial Sequence
  Description of Artificial Sequence: Synthetic polypeptide
EVQLVESGGGLVQPGGSLRLSCAASGFTFDDDYVMGWFRQAPGKEREFVAAVSGSGDDTYYADSVKGRFTISADNSKNTAYLQMNSLKPEDTAVYYCAADRRGLASTRAADYDWGQGTLVTVSS

SEQ ID NO: 3126 - protein, 120 aa, Artificial Sequence
  Description of Artificial Sequence: Synthetic polypeptide
EVQLVESGGGLVQPGGSLRLSCAASGRTFGDYIMGWFRQAPGKEREFVAAINWSAGYTAYADSVKGRFTISADNSKNTAYLQMNSLKPEDTAVYYCATEPPLSCWHFDLWGQGTLVTVSS

SEQ ID NO: 3127 - protein, 120 aa, Artificial Sequence
  Description of Artificial Sequence: Synthetic polypeptide
EVQLVESGGGLVQPGGSLRLSCAASGRTFGDYIMGWFRQAPGKEREIVAAINWSGGYTPYADSVKGRFTISADNSKNTAYLQMNSLKPEDTAVYYCATAPPNTGWHFDHWGQGTLVTVSS

SEQ ID NO: 3128 - protein, 120 aa, Artificial Sequence
  Description of Artificial Sequence: Synthetic polypeptide
EVQLVESGGGLVQPGGSLRLSCAASGRTFGDDTMGWFRQAPGKEREIVAAINWSAGYTPYADSVKGRFTISADNSKNTAYLQMNSLKPEDTAVYYCATDPPLFCCHFDLWGQGTLVTVSS

SEQ ID NO: 3129 - protein, 114 aa, Artificial Sequence
  Description of Artificial Sequence: Synthetic polypeptide
EVQLVESGGGLVQPGGSLRLSCAASGRTFSDDTMGWFRQAPGKEREFVAAISWSGGTTRYADSVKGRFTISADNSKNTAYLQMNSLKPEDTAVYYCATDPPLFWGQGTLVTVSS

SEQ ID NO: 3130 - protein, 114 aa, Artificial Sequence
  Description of Artificial Sequence: Synthetic polypeptide
EVQLVESGGGLVQPGGSLRLSCAASGRTFSDDTMGWFRQAPGKEREFVAAINWSGDSTYYADSVKGRFTISADNSKNTAYLQMNSLKPEDTAVYYCATDPPLFWGQGTLVTVSS

SEQ ID NO: 3131 - protein, 114 aa, Artificial Sequence
  Description of Artificial Sequence: Synthetic polypeptide
EVQLVESGGGLVQPGGSLRLSCAASGRTFSDDTMGWFRQAPGKEREFVAAINWSGGTTRYADSVKGRFTISADNSKNTAYLQMNSLKPEDTAVYYCATDPPLFWGQGTLVTVSS

SEQ ID NO: 3132 - protein, 114 aa, Artificial Sequence
  Description of Artificial Sequence: Synthetic polypeptide
EVQLVESGGGLVQPGGSLRLSCAASGRTFSDDAMGWFRQAPGKEREFVAAIHWSGSSTRYADSVKGRFTISADNSKNTAYLQMNSLKPEDTAVYYCATDPPLFWGQGTLVTVSS

SEQ ID NO: 3133 - protein, 114 aa, Artificial Sequence
  Description of Artificial Sequence: Synthetic polypeptide
EVQLVESGGGLVQPGGSLRLSCAASGRTFSDDTMGWFRQAPGKERELVGTINWSGGSTYYADSVKGRFTISADNSKNTAYLQMNSLKPEDTAVYYCATDPPLFWGQGTLVTVSS

SEQ ID NO: 3134 - protein, 114 aa, Artificial Sequence
  Description of Artificial Sequence: Synthetic polypeptide
EVQLVESGGGLVQPGGSLRLSCAASGRTFGDYIMGWFRQAPGKEREFVAAINWSGGYTPYADSVKGRFTISADNSKNTAYLQMNSLKPEDTAVYYCATDPPLFWGQGTLVTVSS

SEQ ID NO: 3135 - protein, 114 aa, Artificial Sequence
  Description of Artificial Sequence: Synthetic polypeptide
EVQLVESGGGLVQPGGSLRLSCAASGRTFGDDTMGWFRQAPGKERELVAAINWNGGNTHYADSVKGRFTISADNSKNTAYLQMNSLKPEDTAVYYCATDPPLFWGQGTLVTVSS

SEQ ID NO: 3136 - protein, 114 aa, Artificial Sequence
  Description of Artificial Sequence: Synthetic polypeptide
EVQLVESGGGLVQPGGSLRLSCAASGRTFSDDAMGWFRQAPGKEREFVAAINWSGGTTRYADSVKGRFTISADNSKNTAYLQMNSLKPEDTAVYYCATDPPLFWGQGTLVTVSS

SEQ ID NO: 3137 - protein, 120 aa, Artificial Sequence
  Description of Artificial Sequence: Synthetic polypeptide
EVQLVESGGGLVQPGGSLRLSCAASGRTFGDYIMGWFRQAPGKERESVAAINWSAGYTPYADSVKGRFTISADNSKNTAYLQMNSLKPEDTAVYYCATDPPLFWGHVDLWGQGTLVTVSS

SEQ ID NO: 3138 - protein, 114 aa, Artificial Sequence
  Description of Artificial Sequence: Synthetic polypeptide
EVQLVESGGGLVQPGGSLRLSCAASGRTFSDDTMGWFRQAPGKEREWVASINWSGGSTYYADSVKGRFTISADNSKNTAYLQMNSLKPEDTAVYYCATDPPLFWGQGTLVTVSS

SEQ ID NO: 3139 - protein, 114 aa, Artificial Sequence
  Description of Artificial Sequence: Synthetic polypeptide
EVQLVESGGGLVQPGGSLRLSCAASGRTFSDDAMGWFRQAPGKEREFVAGISWNGGSIYYADSVKGRFTISADNSKNTAYLQMNSLKPEDTAVYYCATDPPLFWGQGTLVTVSS

SEQ ID NO: 3140 - protein, 123 aa, Artificial Sequence
  Description of Artificial Sequence: Synthetic polypeptide
EVQLVESGGGLVQPGGSLRLSCAASGFTFDDYEMGWFRQAPGKEREFVAAISWRGGTTYYADSVKGRFTISADNSKNTAYLQMNSLKPEDTAVYYCAADRRGLASTRAGDYDWGQGTLVTVSS

SEQ ID NO: 3141 - protein, 120 aa, Artificial Sequence
  Description of Artificial Sequence: Synthetic polypeptide
EVQLVESGGGLVQPGGSLRLSCAASGRTFGDDTMGWFRQAPGKEREFVAAINWSGGYTPYADSVKGRFTISADNSKNTAYLQMNSLKPEDTAVYYCATDPPLFWGHVDLWGQGTLVTVSS

SEQ ID NO: 3142 - protein, 114 aa, Artificial Sequence
  Description of Artificial Sequence: Synthetic polypeptide
EVQLVESGGGLVQPGGSLRLSCAASGRTFSDDAMGWFRQAPGKEREFVAAINWSGGSTRYADSVKGRFTISADNSKNTAYLQMNSLKPEDTAVYYCATDPPLFWGQGTLVTVSS

SEQ ID NO: 3143 - protein, 128 aa, Artificial Sequence
  Description of Artificial Sequence: Synthetic polypeptide
EVQLVESGGGLVQPGGSLRLSCAASGVTLDDYAMGWFRQAPGKEREFVAVINWSGGSTDYADSVKGRFTISADNSKNTAYLQMNSLKPEDTAVYYCARGGGWVPSSTSESLNWYFDRWGQGTLVTVSS

SEQ ID NO: 3144 - protein, 120 aa, Artificial Sequence
  Description of Artificial Sequence: Synthetic polypeptide
EVQLVESGGGLVQPGGSLRLSCAASGRTFGDYIMGWFRQAPGKERESVAAINWSGGTTPYADSVKGRFTISADNSKNTAYLQMNSLKPEDTAVYYCATDPPLFCCHVDLWGQGTLVTVSS

SEQ ID NO: 3145 - protein, 114 aa, Artificial Sequence
  Description of Artificial Sequence: Synthetic polypeptide
EVQLVESGGGLVQPGGSLRLSCAASGLTFSDDTMGWFRQAPGKEREFVAAVSWSGGNTYYADSVKGRFTISADNSKNTAYLQMNSLKPEDTAVYYCATDPPLFWGQGTLVTVSS

SEQ ID NO: 3146 - protein, 114 aa, Artificial Sequence
  Description of Artificial Sequence: Synthetic polypeptide
EVQLVESGGGLVQPGGSLRLSCAASGRTFGDDTMGWFRQAPGKEREFVAAINWTGGYTPYADSVKGRFTISADNSKNTAYLQMNSLKPEDTAVYYCATDPPLFWGQGTLVTVSS

SEQ ID NO: 3147 - protein, 120 aa, Artificial Sequence
  Description of Artificial Sequence: Synthetic polypeptide
EVQLVESGGGLVQPGGSLRLSCAASGRTFGDYIMGWFRQAPGKEREFVATINWTAGYTYYADSVKGRFTISADNSKNTAYLQMNSLKPEDTAVYYCATDPPLFCWHFDHWGQGTLVTVSS

SEQ ID NO: 3148 - protein, 114 aa, Artificial Sequence
  Description of Artificial Sequence: Synthetic polypeptide
EVQLVESGGGLVQPGGSLRLSCAASGRTFGDDTMGWFRQAPGKEREFVAAINWSGGNTDYADSVKGRFTISADNSKNTAYLQMNSLKPEDTAVYYCATDPPLFWGQGTLVTVSS

SEQ ID NO: 3149 - protein, 114 aa, Artificial Sequence
  Description of Artificial Sequence: Synthetic polypeptide
EVQLVESGGGLVQPGGSLRLSCAASGRTFGDYTMGWFRQAPGKEREFVAAINWSGGNTYYADSVKGRFTISADNSKNTAYLQMNSLKPEDTAVYYCATDPPLFWGQGTLVTVSS

SEQ ID NO: 3150 - protein, 114 aa, Artificial Sequence
  Description of Artificial Sequence: Synthetic polypeptide
EVQLVESGGGLVQPGGSLRLSCAASGRTFSDDTMGWFRQAPGKEREFVAGINWSGNGVYYADSVKGRFTISADNSKNTAYLQMNSLKPEDTAVYYCATDPPLFWGQGTLVTVSS

SEQ ID NO: 3151 - protein, 114 aa, Artificial Sequence
  Description of Artificial Sequence: Synthetic polypeptide
EVQLVESGGGLVQPGGSLRLSCAASGRTFGDYAMGWFRQAPGKERELVAPINWSGGSTYYADSVKGRFTISADNSKNTAYLQMNSLKPEDTAVYYCATDPPLFWGQGTLVTVSS

SEQ ID NO: 3152 - protein, 118 aa, Artificial Sequence
  Description of Artificial Sequence: Synthetic polypeptide
EVQLVESGGGLVQPGGSLRLSCAASGGTFSNSGMGWFRQAPGKERELVAVVNWSGRRTYYADSVKGRFTISADNSKNTAYLQMNSLKPEDTAVYYCAVPWMDYNRRDWGQGTLVTVSS

SEQ ID NO: 3153 - protein, 118 aa, Artificial Sequence
  Description of Artificial Sequence: Synthetic polypeptide
EVQLVESGGGLVQPGGSLRLSCAASGQLANFASYAMGWFRQAPGKEREFVAAITRSGSSTVYADSVKGRFTISADNSKNTAYLQMNSLKPEDTAVYYCATTMNPNPRWGQGTLVTVSS

SEQ ID NO: 3154 - protein, 114 aa, Artificial Sequence
  Description of Artificial Sequence: Synthetic polypeptide
EVQLVESGGGLVQPGGSLRLSCAASGRTFSDDIMGWFRQAPGKEREFVAAINWTGGSTYYADSVKGRFTISADNSKNTAYLQMNSLKPEDTAVYYCATDPPLFWGQGTLVTVSS

SEQ ID NO: 3155 - protein, 120 aa, Artificial Sequence
  Description of Artificial Sequence: Synthetic polypeptide
EVQLVESGGGLVQPGGSLRLSCAASGRTFGDYIMGWFRQAPGKEREIVAAINWSAGYTAYADSVKGRFTISADNSKNTAYLQMNSLKPEDTAVYYCATARPNTGWHFDHWGQGTLVTVSS

SEQ ID NO: 3156 - protein, 114 aa, Artificial Sequence
  Description of Artificial Sequence: Synthetic polypeptide
EVQLVESGGGLVQPGGSLRLSCAASGRTFSDDTMGWFRQAPGKEREWVGSINWSGGSTYYADSVKGRFTISADNSKNTAYLQMNSLKPEDTAVYYCATDPPLFWGQGTLVTVSS

SEQ ID NO: 3157 - protein, 114 aa, Artificial Sequence
  Description of Artificial Sequence: Synthetic polypeptide
EVQLVESGGGLVQPGGSLRLSCAASGRTFSDDTMGWFRQAPGKEREFVAGMTWSGSSTFYADSVKGRFTISADNSKNTAYLQMNSLKPEDTAVYYCATDPPLFWGQGTLVTVSS

SEQ ID NO: 3158 - protein, 114 aa, Artificial Sequence
  Description of Artificial Sequence: Synthetic polypeptide
EVQLVESGGGLVQPGGSLRLSCAASGRTFGDYIMGWFRQAPGKERECVAAINWSGDYTDYADSVKGRFTISADNSKNTAYLQMNSLKPEDTAVYYCATDPPLFWGQGTLVTVSS

SEQ ID NO: 3159 - protein, 114 aa, Artificial Sequence
  Description of Artificial Sequence: Synthetic polypeptide
EVQLVESGGGLVQPGGSLRLSCAASGRTFGDYIMGWFRQAPGKEREFVGGINWSGGYTYYADSVKGRFTISADNSKNTAYLQMNSLKPEDTAVYYCATDPPLFWGQGTLVTVSS

SEQ ID NO: 3160 - protein, 114 aa, Artificial Sequence
  Description of Artificial Sequence: Synthetic polypeptide
EVQLVESGGGLVQPGGSLRLSCAASGRTFSDDTMGWFRQAPGKEREFVAAVNWSGGSTYYADSVKGRFTISADNSKNTAYLQMNSLKPEDTAVYYCATDPPLFWGQGTLVTVSS

SEQ ID NO: 3161 - protein, 114 aa, Artificial Sequence
  Description of Artificial Sequence: Synthetic polypeptide
EVQLVESGGGLVQPGGSLRLSCAASGRTFGDYAMGWFRQAPGKEREFVAAINWSGGYTRYADSVKGRFTISADNSKNTAYLQMNSLKPEDTAVYYCATDPPLFWGQGTLVTVSS

SEQ ID NO: 3162 - protein, 114 aa, Artificial Sequence
  Description of Artificial Sequence: Synthetic polypeptide
EVQLVESGGGLVQPGGSLRLSCAASGRTFGDDTMGWFRQAPGKEREFVAAINWSGGYTPYADSVKGRFTISADNSKNTAYLQMNSLKPEDTAVYYCATDPPLFWGQGTLVTVSS

SEQ ID NO: 3163 - protein, 120 aa, Artificial Sequence
  Description of Artificial Sequence: Synthetic polypeptide
EVQLVESGGGLVQPGGSLRLSCAASGRTFGDYIMGWFRQAPGKERESVAAINWSAGYTAYADSVKGRFTISADNSKNTAYLQMNSLKPEDTAVYYCARASPNTGWHFDRWGQGTLVTVSS

SEQ ID NO: 3164 - protein, 114 aa, Artificial Sequence
  Description of Artificial Sequence: Synthetic polypeptide
EVQLVESGGGLVQPGGSLRLSCAASGRTFGDYIMGWFRQAPGKEREFVAAINWSGGYTHYADSVKGRFTISADNSKNTAYLQMNSLKPEDTAVYYCATDPPLFWGQGTLVTVSS

SEQ ID NO: 3165 - protein, 114 aa, Artificial Sequence
  Description of Artificial Sequence: Synthetic polypeptide
EVQLVESGGGLVQPGGSLRLSCAASGRTFSDDTMGWFRQAPGKEREFVAAITWSGGRTRYADSVKGRFTISADNSKNTAYLQMNSLKPEDTAVYYCATDRPLFWGQGTLVTVSS

SEQ ID NO: 3166 - protein, 120 aa, Artificial Sequence
  Description of Artificial Sequence: Synthetic polypeptide
EVQLVESGGGLVQPGGSLRLSCAASGRTFGDYIMGWFRQAPGKERESVAAINWSGGYTAYADSVKGRFTISADNSKNTAYLQMNSLKPEDTAVYYCATASPNTGWHFDHWGQGTLVTVSS

SEQ ID NO: 3167 - protein, 114 aa, Artificial Sequence
  Description of Artificial Sequence: Synthetic polypeptide
EVQLVESGGGLVQPGGSLRLSCAASGRTFSDDTMGWFRQAPGKEREFVAAIHWSGSSTRYADSVKGRFTISADNSKNTAYLQMNSLKPEDTAVYYCATDPPLFWGQGTLVTVSS

SEQ ID NO: 3168 - protein, 114 aa, Artificial Sequence
  Description of Artificial Sequence: Synthetic polypeptide
EVQLVESGGGLVQPGGSLRLSCAASGRTFSDYTMGWFRQAPGKEREWVAAINWSGGTTYYADSVKGRFTISADNSKNTAYLQMNSLKPEDTAVYYCATDPPLFWGQGTLVTVSS

SEQ ID NO: 3169 - protein, 114 aa, Artificial Sequence
  Description of Artificial Sequence: Synthetic polypeptide
EVQLVESGGGLVQPGGSLRLSCAASGRTFGDDTMGWFRQAPGKEREFVAAINWSGDNTHYADSVKGRFTISADNSKNTAYLQMNSLKPEDTAVYYCATDPPLFWGQGTLVTVSS

SEQ ID NO: 3170 - protein, 118 aa, Artificial Sequence
  Description of Artificial Sequence: Synthetic polypeptide
EVQLVESGGGLVQPGGSLRLSCAASGFAFGDNWIGWFRQAPGKEREWVASISSGGTTAYADNVKGRFTIIADNSKNTAYLQMNSLKPEDTAVYYCAHRGGWLRPWGYWGQGTLVTVSS

SEQ ID NO: 3171 - protein, 114 aa, Artificial Sequence
  Description of Artificial Sequence: Synthetic polypeptide
EVQLVESGGGLVQPGGSLRLSCAASGRTFSDDAMGWFRQAPGKEREFVGRINWSGGNTYYADSVKGRFTISADNSKNTAYLQMNSLKPEDTAVYYCATDPPLFWGQGTLVTVSS

SEQ ID NO: 3172 - protein, 114 aa, Artificial Sequence
  Description of Artificial Sequence: Synthetic polypeptide
EVQLVESGGGLVQPGGSLRLSCAASGRTFSDDTMGWFRQAPGKEREFVGGISWSGGNTYYADSVKGRFTISADNSKNTAYLQMNSLKPEDTAVYYCATDPPLFWGQGTLVTVSS

SEQ ID NO: 3173 - protein, 114 aa, Artificial Sequence
  Description of Artificial Sequence: Synthetic polypeptide
EVQLVESGGGLVQPGGSLRLSCAASGRTFSDDTMGWFRQAPGKEREFVAAINWSGGSTYYADSVKGRFTISADNSKNTAYLQMNSLKPEDTAVYYCATDPPLFWGQGTLVTVSS

SEQ ID NO: 3174 - protein, 114 aa, Artificial Sequence
  Description of Artificial Sequence: Synthetic polypeptide
EVQLVESGGGLVQPGGSLRLSCAASGRTFGDDTMGWFRQAPGKEREFVAAINWSGGYTYYADSVKGRFTISADNSKNTAYLQMNSLKPEDTAVYYCATDPPLFWGQGTLVTVSS

SEQ ID NO: 3175 - protein, 120 aa, Artificial Sequence
  Description of Artificial Sequence: Synthetic polypeptide
EVQLVESGGGLVQPGGSLRLSCAASGRTFGDYIMGWFRQAPGKEREFVAAINWSADYTAYADSVKGRFTISADNSKNTAYLQMNSLKPEDTAVYYCATDPPLFCWHFDHWGQGTLVTVSS

SEQ ID NO: 3176 - protein, 114 aa, Artificial Sequence
  Description of Artificial Sequence: Synthetic polypeptide
EVQLVESGGGLVQPGGSLRLSCAASGRTFSDDAMGWFRQAPGKEREFVAAINWSGSSTYYADSVKGRFTISADNSKNTAYLQMNSLKPEDTAVYYCATDPPLFWGQGTLVTVSS

SEQ ID NO: 3177 - protein, 120 aa, Artificial Sequence
  Description of Artificial Sequence: Synthetic polypeptide
EVQLVESGGGLVQPGGSLRLSCAASGRTFGDYIMGWFRQAPGKEREMVAAINWIAGYTADADSVRRLFTITADNNKNTAHLMMNLLKPENTAVYYCAEPSPNTGWHFDHWGQGTLVTVSS

SEQ ID NO: 3178 - protein, 114 aa, Artificial Sequence
  Description of Artificial Sequence: Synthetic polypeptide
EVQLVESGGGLVQPGGSLRLSCAASGRTFGDDTMGWFRQAPGKEREFVAAINWSGGNTPYADSVKGRFTISADNSKNTAYLQMNSLKPEDTAVYYCATDPPLFWGQGTLVTVSS

SEQ ID NO: 3179 - protein, 114 aa, Artificial Sequence
  Description of Artificial Sequence: Synthetic polypeptide
EVQLVESGGGLVQPGGSLRLSCAASGRTFSDDTMGWFRQAPGKEREFVAAINWSGDNTHYADSVKGRFTISADNSKNTAYLQMNSLKPEDTAVYYCATDPPLFWGQGTLVTVSS

SEQ ID NO: 3180 - protein, 120 aa, Artificial Sequence
  Description of Artificial Sequence: Synthetic polypeptide
EVQLVESGGGLVQPGGSLRLSCAASGRTFGDYIMGWFRQAPGKEREIVAAINWSAGYTAYADSVKGRFTISADNSKNTAYLQMNSLKPEDTAVYYCATAPPLFCWHFDHWGQGTLVTVSS

SEQ ID NO: 3181 - protein, 120 aa, Artificial Sequence
  Description of Artificial Sequence: Synthetic polypeptide
EVQLVESGGGLVQPGGSLRLSCAASGFTFGDYVMGWFRQAPGKEREIVAAINWNAGYTAYADSVRGLFTITADNSKNTAYLQMNSLKPEDTAVYYCAKASPNTGWHFDHWGQGTLVTVSS

SEQ ID NO: 3182 - protein, 114 aa, Artificial Sequence
  Description of Artificial Sequence: Synthetic polypeptide
EVQLVESGGGLVQPGGSLRLSCAASGRTFGDYTMGWFRQAPGKEREFVAAINWTGGYTYYADSVKGRFTISADNSKNTAYLQMNSLKPEDTAVYYCATDPPLFWGQGTLVTVSS

SEQ ID NO: 3183 - protein, 120 aa, Artificial Sequence
  Description of Artificial Sequence: Synthetic polypeptide
EVQLVESGGGLVQPGGSLRLSCAASGRTFGDYIMGWFRQAPGKEREIVAAINWSAGYTAYADSVKGLFTITADNSKNTAYLQMNILKPEDTAVYYCARATPNTGWHFDHWGQGTLVTVSS

SEQ ID NO: 3184 - protein, 114 aa, Artificial Sequence
  Description of Artificial Sequence: Synthetic polypeptide
EVQLVESGGGLVQPGGSLRLSCAASGRTFGDYIMGWFRQAPGKEREFVAAINWSGDNTHYADSVKGRFTISADNSKNTAYLQMNSLKPEDTAVYYCATDPPLFWGQGTLVTVSS

SEQ ID NO: 3185 - protein, 120 aa, Artificial Sequence
  Description of Artificial Sequence: Synthetic polypeptide
EVQLVESGGGLVQPGGSLRLSCAASGRTFGDYIMGWFRQAPGKEREIVAAINWSAGYTPYADSVKGRFTISADNSKNTAYLQMNSLKPEDTAVYYCATDPPLFCCHFDHWGQGTLVTVSS

SEQ ID NO: 3186 - protein, 120 aa, Artificial Sequence
  Description of Artificial Sequence: Synthetic polypeptide
EVQLVESGGGLVQPGGSLRLSCAASGRTFGDYIMGWFRQAPGKERESVAAINWSAGYTAYADSVKGRFTISADNSKNTAYLQMNSLKPEDTAVYYCATAPPNTGWHFDHWGQGTLVTVSS

SEQ ID NO: 3187 - protein, 123 aa, Artificial Sequence
  Description of Artificial Sequence: Synthetic polypeptide
EVQLVESGGGLVQPGGSLRLSCAASGFTWGDYTMGWFRQAPGKEREFVAAINWSGGNTYYADSVKGRFTISADNSKNTAYLQMNSLKPEDTAVYYCAADRRGLASTRAADYDWGQGTLVTVSS

SEQ ID NO: 3188 - protein, 122 aa, Artificial Sequence
  Description of Artificial Sequence: Synthetic polypeptide
EVQLVESGGGLVQPGGSLRLSCAASGIPSTLRAMGWFRQAPGKEREFVAAVSSLGPFTRYADSVKGRFTISADNSKNTAYLQMNSLKPEDTAVYYCAAKPGWVARDPSQYNWGQGTLVTVSS

SEQ ID NO: 3189 - protein, 124 aa, Artificial Sequence
  Description of Artificial Sequence: Synthetic polypeptide
EVQLVESGGGLVQPGGSLRLSCAASGFSFDDDYVMGWFRQAPGKEREFVAAINWSGGSTYYADSVKGRFTISADNSKNTAYLQMNSLKPEDTAVYYCAADRRGLASTRAADYDWGQGTLVTVSS

SEQ ID NO: 3190 - protein, 116 aa, Artificial Sequence
  Description of Artificial Sequence: Synthetic polypeptide
EVQLVESGGGLVQPGGSLRLSCAASGRTFSNAAMGWFRQAPGKEREFVARILWTGASRSYADSVKGRFTISADNSKNTAYLQMNSLKPEDTAVYYCATTENPNPRWGQGTLVTVSS

SEQ ID NO: 3191 - protein, 120 aa, Artificial Sequence
  Description of Artificial Sequence: Synthetic polypeptide
EVQLVESGGGLVQPGGSLRLSCAASGGTFGVYHMGWFRQAPGKEREGVAAINMSGDDSAYADSVKGRFTISADNSKNTAYLQMNSLKPEDTAVYYCAILVGPGQVEFDHWGQGTLVTVSS

SEQ ID NO: 3192 - protein, 124 aa, Artificial Sequence
  Description of Artificial Sequence: Synthetic polypeptide
EVQLVESGGGLVQPGGSLRLSCAASGFTFSSYYMGWFRQAPGKEREFVARISGSTFYADSVKGRFTISADNSKNTAYLQMNSLKPEDTAVYYCAALPFVCPSGSYSDYGDEYDWGQGTLVTVSS

SEQ ID NO: 3193 - protein, 114 aa, Artificial Sequence
  Description of Artificial Sequence: Synthetic polypeptide
EVQLVESGGGLVQPGGSLRLSCAASGRTFSGDFMGWFRQAPGKEREFVGRINWSGGNTYYADSVRGLFTITADNNKNTAYLMMNLLKPEDTAVYYCPTDPPLFWGLGTLVTWSS

SEQ ID NO: 3194 - protein, 119 aa, Artificial Sequence
  Description of Artificial Sequence: Synthetic polypeptide
EVQLVESGGGLVQPGGSLRLSCAASGSTLRDYAMGWFRQAPGKERESVAAITWSGGSTAYADSVKGRFTISADNSKNTAYLQMNSLKPEDTAVYYCASLLAGDRYFDYWGQGTLVTVSS

SEQ ID NO: 3195 - protein, 123 aa, Artificial Sequence
  Description of Artificial Sequence: Synthetic polypeptide
EVQLVESGGGLVQPGGSLRLSCAASGFTFDDYTMGWFRQAPGKEREFVAAITDNGGSKYYADSVKGRFTISADNSKNTAYLQMNSLKPEDTAVYYCAADRRGLASTRAADYDWGQGTLVTVSS

SEQ ID NO: 3196 - protein, 122 aa, Artificial Sequence
  Description of Artificial Sequence: Synthetic polypeptide
EVQLVESGGGLVQPGGSLRLSCAASGGTFSSYGMGWFRQAPGKEREFVAAINWSGASTYYADSVKGRFTISADNSKNTAYLQMNSLKPEDTAVYYCARDWRDRTWGNSLDYWGQGTLVTVSS

SEQ ID NO: 3197 - protein, 124 aa, Artificial Sequence
  Description of Artificial Sequence: Synthetic polypeptide
EVQLVESGGGLVQPGGSLRLSCAASGFSFDDDYVMGWFRQAPGKEREFVAAISWSEDNTYYADSVKGRFTISADNSKNTAYLQMNSLKPEDTAVYYCAADRRGLASTRAADYDWGQGTLVTVSS

SEQ ID NO: 3198 - protein, 124 aa, Artificial Sequence
  Description of Artificial Sequence: Synthetic polypeptide
EVQLVESGGGLVQPGGSLRLSCAASGFSFDDDYVMGWFRQAPGKEREFVAAVSGSGDDTYYADSVKGRFTISADNSKNTAYLQMNSLKPEDTAVYYCAADRRGLASTRAADYDWGQGTLVTVSS

SEQ ID NO: 3199 - protein, 126 aa, Artificial Sequence
  Description of Artificial Sequence: Synthetic polypeptide
EVQLVESGGGLVQPGGSLRLSCAASGNIAAINVMGWFRQAPGKEREFVAAISASGRRTDYADSVKGRFTISADNSKNTAYLQMNSLKPEDTAVYYCARRVYYYDSSGPPGVTFDIWGQGTLVTVSS

SEQ ID NO: 3200 - protein, 118 aa, Artificial Sequence
  Description of Artificial Sequence: Synthetic polypeptide
EVQLVESGGGLVQPGGSLRLSCAASGIITSRYVMGWFRQAPGKEREGVAAISTGGSTIYADSVKGRFTISADNSKNTAYLQMNSLKPEDTAVYYCARQDSSSPYFDYWGQGTLVTVSS

SEQ ID NO: 3201 - protein, 124 aa, Artificial Sequence
  Description of Artificial Sequence: Synthetic polypeptide
EVQLVESGGGLVQPGGSLRLSCAASGFSFDDDYVMGWFRQAPGKEREFVAAISNSGLSTYYADSVKGRFTISADNSKNTAYLQMNSLKPEDTAVYYCAADRRGLASTRAADYDWGQGTLVTVSS

SEQ ID NO: 3202 - protein, 126 aa, Artificial Sequence
  Description of Artificial Sequence: Synthetic polypeptide
EVQLVESGGGLVQPGGSLRLSCAASGSISSINVMGWFRQAPGKEREFVATMRWSTGSTYYADSVKGRFTISADNSKNTAYLQMNSLKPEDTAVYYCAQRVRGFFGPLRTTPSWYEWGQGTLVTVSS

SEQ ID NO: 3203 - protein, 127 aa, Artificial Sequence
  Description of Artificial Sequence: Synthetic polypeptide
EVQLVESGGGLVQPGGSLRLSCAASGLTFILYRMGWFRQAPGKEREFVAAINNFGTTKYADSVKGRFTISADNSKNTAYLQMNSLKPEDTAVYYCARTHYDFWSGYTSRTPNYFDYWGQGTLVTVSS

SEQ ID NO: 3204 - protein, 120 aa, Artificial Sequence
  Description of Artificial Sequence: Synthetic polypeptide
EVQLVESGGGLVQPGGSLRLSCAASGGTFSVYHMGWFRQAPGKEREPVAAISWSGGSTAYADSVKGRFTISADNSKNTAYLQMNSLKPEDTAVYYCAAVNTWTSPSFDSWGQGTLVTVSS

SEQ ID NO: 3205 - protein, 120 aa, Artificial Sequence
  Description of Artificial Sequence: Synthetic polypeptide
EVQLVESGGGLVQPGGSLRLSCAASGRAFSTYGMGWFRQAPGKEREFVAGINWSGDTPYYADSVKGRFTISADNSKNTAYLQMNSLKPEDTAVYYCAREVGPPPGYFDLWGQGTLVTVSS

SEQ ID NO: 3206 - protein, 123 aa, Artificial Sequence
  Description of Artificial Sequence: Synthetic polypeptide
EVQLVESGGGLVQPGGSLRLSCAASGRTFSDIAMGWFRQAPGKEREFVASINWGGGNTYYADSVKGRFTISADNSKNTAYLQMNSLKPEDTAVYYCAAKGIWDYLGRRDFGDWGQGTLVTVSS

SEQ ID NO: 3207 - protein, 116 aa, Artificial Sequence
  Description of Artificial Sequence: Synthetic polypeptide
EVQLVESGGGLVQPGGSLRLSCAASGRTFSSARMGWFRQAPGKEREFVAAISWSGDNTHYADSVKGRFTISADNSKNTAYLQMNSLKPEDTAVYYCATTENPNPRWGQGTLVTVSS

SEQ ID NO: 3208 - protein, 115 aa, Artificial Sequence
  Description of Artificial Sequence: Synthetic polypeptide
EVQLVESGGGLVQPGGSLRLSCAASGFAFSSYAMGWFRQAPGKEREWVATINGDDYTYYADSVKGRFTISADNSKNTAYLQMNSLKPEDTAVYYCVATPGGYGLWGQGTLVTVSS

SEQ ID NO: 3209 - protein, 125 aa, Artificial Sequence
  Description of Artificial Sequence: Synthetic polypeptide
EVQLVESGGGLVQPGGSLRLSCAASGITFRRHDMGWFRQAPGKEREFVAAIRWSSSSTVYADSVKGRFTISADNSKNTAYLQMNSLKPEDTAVYYCAADRGVYGGRWYRTSQYTWGQGTLVTVSS

SEQ ID NO: 3210 - protein, 119 aa, Artificial Sequence
  Description of Artificial Sequence: Synthetic polypeptide
EVQLVESGGGLVQPGGSLRLSCAASGTAASFNPMGWFRQAPGKEREFVAAITSGGSTNYADSVKGRFTISADNSKNTAYLQMNSLKPEDTAVYYCAAIAYEEGVYRWDWGQGTLVTVSS

SEQ ID NO: 3211 - protein, 119 aa, Artificial Sequence
  Description of Artificial Sequence: Synthetic polypeptide
EVQLVESGGGLVQPGGSLRLSCAASGNINIINYMGWFRQAPGKEREGVAAIHWNGDSTAYADSVKGRFTISADNSKNTAYLQMNSLKPEDTAVYYCASGPPYSNYFAYWGQGTLVTVSS

SEQ ID NO: 3212 - protein, 120 aa, Artificial Sequence
  Description of Artificial Sequence: Synthetic polypeptide
EVQLVESGGGLVQPGGSLRLSCAASGFTFDDYAMGWFRQAPGKERESVAAISGSGGSTAYADSVKGRFTISADNSKNTAYLQMNSLKPEDTAVYYCAKIMGSGRPYFDHWGQGTLVTVSS

SEQ ID NO: 3213 - protein, 119 aa, Artificial Sequence
  Description of Artificial Sequence: Synthetic polypeptide
EVQLVESGGGLVQPGGSLRLSCAASGNIFTRNVMGWFRQAPGKEREFVAAITSSGSTNYADSVKGRFTISADNSKNTAYLQMNSLKPEDTAVYYCARPSSDLQGGVDYWGQGTLVTVSS

SEQ ID NO: 3214 - protein, 123 aa, Artificial Sequence
  Description of Artificial Sequence: Synthetic polypeptide
EVQLVESGGGLVQPGGSLRLSCAASGRTFSSIAMGWFRQAPGKEREFVASINWGGGNTIYADSVKGRFTISADNSKNTAYLQMNSLKPEDTAVYYCAAKGIWDYLGRRDFGDWGQGTLVTVSS

SEQ ID NO: 3215 - protein, 122 aa, Artificial Sequence
  Description of Artificial Sequence: Synthetic polypeptide
EVQLVESGGGLVQPGGSLRLSCAASGIPSTLRAMGWFRQAPGKEREFVAAVSSLGPFTRYADSVKGRFTISADNSKNTAYLQMNSLKPEDTAVYYCAAKPGWVARDPSEYNWGQGTLVTVSS

SEQ ID NO: 3216 - protein, 118 aa, Artificial Sequence
  Description of Artificial Sequence: Synthetic polypeptide
EVQLVESGGGLVQPGGSLRLSCAASGFTLDDSAMGWFRQAPGKEREWVAAITNGGSTYYADSVKGRFTISADNSKNTAYLQMNSLKPEDTAVYYCARFARGSPYFDFWGQGTLVTVSS

SEQ ID NO: 3217 - protein, 120 aa, Artificial Sequence
  Description of Artificial Sequence: Synthetic polypeptide
EVQLVESGGGLVQPGGSLRLSCAASGSISSFNAMGWFRQAPGKERESVAAIDWDGSTAYADSVKGRFTISADNSKNTAYLQMNSLKPEDTAVYYCARGGGYYGSGSFEYWGQGTLVTVSS

SEQ ID NO: 3218 - protein, 122 aa, Artificial Sequence
  Description of Artificial Sequence: Synthetic polypeptide
EVQLVESGGGLVQPGGSLRLSCAASGNIFSDNIIGWFRQAPGKEREMVAYYTSGGSIDYADSVKGRFTISADNSKNTAYLQMNSLKPEDTAVYYCARGTAVGRPPPGGMDVWGQGTLVTVSS

SEQ ID NO: 3219 - protein, 119 aa, Artificial Sequence
  Description of Artificial Sequence: Synthetic polypeptide
EVQLVESGGGLVQPGGSLRLSCAASGSISSIGAMGWFRQAPGKEREGVAAISSSGSSTVYADSVKGRFTISADNSKNTAYLQMNSLKPEDTAVYYCARVPPGQAYFDSWGQGTLVTVSS

SEQ ID NO: 3220 - protein, 123 aa, Artificial Sequence
  Description of Artificial Sequence: Synthetic polypeptide
EVQLVESGGGLVQPGGSLRLSCAASGFTFDDYGMGWFRQAPGKERELVATITWSGDSTYYADSVKGRFTISADNSKNTAYLQMNSLKPEDTAVYYCAKGGSWYYDSSGYYGRWGQGTLVTVSS

SEQ ID NO: 3221 - protein, 118 aa, Artificial Sequence
  Description of Artificial Sequence: Synthetic polypeptide
EVQLVESGGGLVQPGGSLRLSCAASGRTFSNYTMGWFRQAPGKEREWVSAISWSTGSTYYADSVKGRFTISADNSKNTAYLQMNSLKPEDTAVYYCAADRYGPPWYDWGQGTLVTVSS

SEQ ID NO: 3222 - protein, 116 aa, Artificial Sequence
  Description of Artificial Sequence: Synthetic polypeptide
EVQLVESGGGLVQPGGSLRLSCAASGSTNYMGWFRQAPGKEREGVAAISMSGDDTIYADSVKGRFTISADNSKNTAYLQMNSLKPEDTAVYYCARIGLRGRYFDLWGQGTLVTVSS

SEQ ID NO: 3223 - protein, 118 aa, Artificial Sequence
  Description of Artificial Sequence: Synthetic polypeptide
EVQLVESGGGLVQPGGSLRLSCAASGGTFSSVGMGWFRQAPGKERELVAVINWSGARTYYADSVKGRFTISADNSKNTAYLQMNSLKPEDTAVYYCAVPWMDYNRRDWGQGTLVTVSS

SEQ ID NO: 3224 - protein, 118 aa, Artificial Sequence
  Description of Artificial Sequence: Synthetic polypeptide
EVQLVESGGGLVQPGGSLRLSCAASGRIFTNTAMGWFRQAPGKEREGVAAINWSGGSTAYADSVKGRFTISADNSKNTAYLQMNSLKPEDTAVYYCARTSGSYSFDYWGQGTLVTVSS

SEQ ID NO: 3225 - protein, 123 aa, Artificial Sequence
  Description of Artificial Sequence: Synthetic polypeptide
EVQLVESGGGLVQPGGSLRLSCAASGEEFSDHWMGWFRQAPGKEREFVGAIHWSGGRTYYADSVKGRFTISADNSKNTAYLQMNSLKPEDTAVYYCAADRRGLASTRAADYDWGQGTLVTVSS

SEQ ID NO: 3226 - protein, 123 aa, Artificial Sequence
  Description of Artificial Sequence: Synthetic polypeptide
EVQLVESGGGLVQPGGSLRLSCAASGRTFSSIAMGWFRQAPGKEREFVAAINWSGARTAYADSVKGRFTISADNSKNTAYLQMNSLKPEDTAVYYCAAKGIWDYLGRRDFGDWGQGTLVTVSS

SEQ ID NO: 3227 - protein, 119 aa, Artificial Sequence
  Description of Artificial Sequence: Synthetic polypeptide
EVQLVESGGGLVQPGGSLRLSCAASGSTSSLRTMGWFRQAPGKEREGVAAISSRDGSTIYADSVKGRFTISADNSKNTAYLQMNSLKPEDTAVYYCARDDSSSPYFDYWGQGTLVTVSS

SEQ ID NO: 3228 - protein, 121 aa, Artificial Sequence
  Description of Artificial Sequence: Synthetic polypeptide
EVQLVESGGGLVQPGGSLRLSCAASGGGTFGSYAMGWFRQAPGKEREFVAAISIASGASGGTTNYADSVKGRFTISADNSKNTAYLQMNSLKPEDTAVYYCATTMNPNPRWGQGTLVTVSS

SEQ ID NO: 3229 - protein, 116 aa, Artificial Sequence
  Description of Artificial Sequence: Synthetic polypeptide
EVQLVESGGGLVQPGGSLRLSCAASGRTFSNAAMGWFRQAPGKEREFVARITWNGGSTFYADSVKGRFTISADNSKNTAYLQMNSLKPEDTAVYYCATTENPNPRWGQGTLVTVSS

SEQ ID NO: 3230 - protein, 123 aa, Artificial Sequence
  Description of Artificial Sequence: Synthetic polypeptide
EVQLVESGGGLVQPGGSLRLSCAASGIILSDNAMGWFRQAPGKEREFVAAISWLGESTYYADSVKGRFTISADNSKNTAYLQMNSLKPEDTAVYYCAADRRGLASTRAADYDWGQGTLVTVSS

SEQ ID NO: 3231 - protein, 120 aa, Artificial Sequence
  Description of Artificial Sequence: Synthetic polypeptide
EVQLVESGGGLVQPGGSLRLSCAASGRTFGDYIMGWFRQAPGKERESVAAINWNGGYTAYADSVKGRFTISADNSKNTAYLQMNSLKPEDTAVYYCATTSPNTGWHYYRWGQGTLVTVSS

SEQ ID NO: 3232 - protein, 128 aa, Artificial Sequence
  Description of Artificial Sequence: Synthetic polypeptide
EVQLVESGGGLVQPGGSLRLSCAASGFNFNWYPMGWFRQAPGKERESVAAISWTGVSTYTAYADSVKGRFTISADNSKNTAYLQMNSLKPEDTAVYYCARWGPGPAGGSPGLVGFDYWGQGTLVTVSS

SEQ ID NO: 3233 - protein, 116 aa, Artificial Sequence
  Description of Artificial Sequence: Synthetic polypeptide
EVQLVESGGGLVQPGGSLRLSCAASGSIRSVSVMGWFRQAPGKEREAVAAISWSGVGTAYADSVKGRFTISADNSKNTAYLQMNSLKPEDTAVYYCAAYQRGWGDWGQGTLVTVSS

SEQ ID NO: 3234 - protein, 122 aa, Artificial Sequence
  Description of Artificial Sequence: Synthetic polypeptide
EVQLVESGGGLVQPGGSLRLSCAASGMTFRLYAMGWFRQAPGKEREFVGAINWLSESTYYADSVKGRFTISADNSKNTAYLQMNSLKPEDTAVYYCAAKPGWVARDPSEYNWGQGTLVTVSS

SEQ ID NO: 3235 - protein, 114 aa, Artificial Sequence
  Description of Artificial Sequence: Synthetic polypeptide
EVQLVESGGGLVQPGGSLRLSCAASGRTFSDDAMGWFRQAPGKEREFVAAINWSGGSTYYADSVKGRFTISADNSKNTAYLQMNSLKPEDTAVYYCATDPPLFWGQGTMVTVSS

SEQ ID NO: 3236 - protein, 125 aa, Artificial Sequence
  Description of Artificial Sequence: Synthetic polypeptide
EVQLVESGGGLVQPGGSLRLSCAASGGTFSVYAMGWFRQAPGKEREGVAAISMSGDDAAYADSVKGRFTISADNSKNTAYLQMNSLKPEDTAVYYCAKISKDDGGKPRGAFFDSWGQGTLVTVSS

SEQ ID NO: 3237 - protein, 120 aa, Artificial Sequence
  Description of Artificial Sequence: Synthetic polypeptide
EVQLVESGGGLVQPGGSLRLSCAASGFALGYYAMGWFRQAPGKERESVAAISSRDGSTAYADSVKGRFTISADNSKNTAYLQMNSLKPEDTAVYYCARLATGPQAYFHHWGQGTLVTVSS

SEQ ID NO: 3238 - protein, 119 aa, Artificial Sequence
  Description of Artificial Sequence: Synthetic polypeptide
EVQLVESGGGLVQPGGSLRLSCAASGFNLDDYAMGWFRQAPGKERESVAAISWDGGATAYADSVKGRFTISADNSKNTAYLQMNSLKPEDTAVYYCARVGRGTTAFDSWGQGTLVTVSS

SEQ ID NO: 3239 - protein, 125 aa, Artificial Sequence
  Description of Artificial Sequence: Synthetic polypeptide
EVQLVESGGGLVQPGGSLRLSCAASGNTFSGGFMGWFRQAPGKEREFVASIRSGARTYYADSVKGRFTISADNSKNTAYLQMNSLKPEDTAVYYCAQRVRGFFGPLRTTPSWYEWGQGTLVTVSS

SEQ ID NO: 3240 - protein, 119 aa, Artificial Sequence
  Description of Artificial Sequence: Synthetic polypeptide
EVQLVESGGGLVQPGGSLRLSCAASGSIRSINIMGWFRQAPGKEREAVAAISWSGGSTVYADSVKGRFTISADNSKNTAYLQMNSLKPEDTAVYYCASLLAGDRYFDYWGQGTLVTVSS

SEQ ID NO: 3241 - protein, 117 aa, Artificial Sequence; identical to SEQ ID NO: 62
  Description of Artificial Sequence: Synthetic polypeptide

SEQ ID NO: 3242 - protein, 121 aa, Artificial Sequence
  Description of Artificial Sequence: Synthetic polypeptide
EVQLVESGGGLVQPGGSLRLSCAASGLRFDDYAMGWFRQAPGKERELVAIKFSGGTTDYADSVKGRFTISADNSKNTAYLQMNSLKPEDTAVYYCASWDGLIGLDAYEYDWGQGTLVTVSS

SEQ ID NO: 3243 - protein, 117 aa, Artificial Sequence
  Description of Artificial Sequence: Synthetic polypeptide
EVQLVESGGGLVQPGGSLRLSCAASGSIFSIDVMGWFRQAPGKEREFVAGISWSGDSTLYADSVKGRFTISADNSKNTAYLQMNSLKPEDTAVYYCAAFDGYTGSDWGQGTLVTVSS

SEQ ID NO: 3244 - protein, 117 aa, Artificial Sequence
  Description of Artificial Sequence: Synthetic polypeptide
EVQLVESGGGLVQPGGSLRLSCAASGFTLADYAMGWFRQAPGKEREFVAVITCSGGSTDYADSVKGRFTISADNSKNTAYLQMNSLKPEDTAVYYCAADDCYIGCGWGQGTLVTVSS

SEQ ID NO: 3245 - protein, 131 aa, Artificial Sequence
  Description of Artificial Sequence: Synthetic polypeptide
EVQLVESGGGLVQPGGSLRLSCAASGRTFSSIAMGWFRQAPGKERELVAEITEGGISPSGDNIYYADSVKGRFTISADNSKNTAYLQMNSLKPEDTAVYYCAAELHSSDYTSPGAESDYGWGQGTLVTVSS

SEQ ID NO: 3246 - protein, 126 aa, Artificial Sequence
  Description of Artificial Sequence: Synthetic polypeptide
EVQLVESGGGLVQPGGSLRLSCAASGPTFSSYAMMGWFRQAPGKEREWVAAINNFGTTKYADSVKGRFTISADNSKNTAYLQMNSLKPEDTAVYYCAASASDYGLGLELFHDEYNWGQGTLVTVSS

SEQ ID NO: 3247 - protein, 111 aa, Artificial Sequence
  Description of Artificial Sequence: Synthetic polypeptide
EVQLVESGGGLVQPGGSLRLSCAASGSTGYMGWFRQAPGKEREFVAAIHSGGSTNYADSVKGRFTISADNSKNTAYLQMNSLKPEDTAVYYCATVATALIWGQGTLVTVSS

SEQ ID NO: 3248 - protein, 123 aa, Artificial Sequence; identical to SEQ ID NO: 3031
  Description of Artificial Sequence: Synthetic polypeptide

SEQ ID NO: 3249 - protein, 115 aa, Artificial Sequence
  Description of Artificial Sequence: Synthetic polypeptide
EVQLVESGGGLVQPGGSLRLSCAASGLTLSTYGMGWFRQAPGKEREFVAHIPRSTYSPYYADSVKGRFTISADNSKNTAYLQMNSLKPEDTAVYYCAAIGDGAVWGQGTLVTVSS

SEQ ID NO: 3250 - protein, 117 aa, Artificial Sequence
  Description of Artificial Sequence: Synthetic polypeptide
EVQLVESGGGLVQPGGSLRLSCAASGFTFNNHNMGWFRQAPGKEREFVAAISSYSHTAYADSVKGRFTISADNSKNTAYLQMNSLKPEDTAVYYCALQPFGASNYRWGQGTLVTVSS

SEQ ID NO: 3251 - protein, 112 aa, Artificial Sequence
  Description of Artificial Sequence: Synthetic polypeptide
EVQLVESGGGLVQPGGSLRLSCAASGGIYRVMGWFRQAPGKERELVASISSGGGINYADSVKGRFTISADNSKNTAYLQMNSLKPEDTAVYYCAAESWGRQWGQGTLVTVSS

SEQ ID NO: 3252 - protein, 115 aa, Artificial Sequence
  Description of Artificial Sequence: Synthetic polypeptide
EVQLVESGGGLVQPGGSLRLSCAASGYTDSNLWMGWFRQAPGKEREFVAINRSTGSTSYADSVKGRFTISADNSKNTAYLQMNSLKPEDTAVYYCATSGSGSPNWGQGTLVTVSS

SEQ ID NO: 3253 - protein, 116 aa, Artificial Sequence
  Description of Artificial Sequence: Synthetic polypeptide
EVQLVESGGGLVQPGGSLRLSCAASGFTFDYYTMGWFRQAPGKEREFVAAIRSSGGLFYADSVKGRFTISADNSKNTAYLQMNSLKPEDTAVYYCAAYLDGYSGSWGQGTLVTVSS

SEQ ID NO: 3254 - protein, 117 aa, Artificial Sequence
  Description of Artificial Sequence: Synthetic polypeptide
EVQLVESGGGLVQPGGSLRLSCAASGGIFSINVMGWFRQAPGKEREWVSAIRWNGGNTAYADSVKGRFTITADNSKNTAYLQMNSLKPEDTAVYYCAGFDGYTGSDWGQGTLVTVSS

SEQ ID NO: 3255 - protein, 116 aa, Artificial Sequence
  Description of Artificial Sequence: Synthetic polypeptide
EVQLVESGGGLVQPGGSLRLSCAASGFTFDGAAMGWFRQAPGKEREFVATIRWTNSTDYADSVKGRFTISADNSKNTAYLQMNSLKPEDTAVYYCARGRYGIVERWGQGTLVTVSS

SEQ ID NO: 3256 - protein, 117 aa, Artificial Sequence
  Description of Artificial Sequence: Synthetic polypeptide
EVQLVESGGGLVQPGGSLRLSCAASGRTHSIYPMGWFRQAPGKERELVAAIHSGGATVYADSVKGRFTISADNSKNTAYLQMNSLKPEDTAVYYCAARRWIPPGPIWGQGTLVTVSS

SEQ ID NO: 3257 - protein, 115 aa, Artificial Sequence
  Description of Artificial Sequence: Synthetic polypeptide
EVQLVESGGGLVQPGGSLRLSCAASGPTFSIYAMGWFRQAPGKEREFVAGIRWSDVYTQYADSVKGRFTISADNSKNTAYLQMNSLKPEDTAVYYCALDIDYRDWGQGTLVTVSS

SEQ ID NO: 3258 - protein, 132 aa, Artificial Sequence
  Description of Artificial Sequence: Synthetic polypeptide
EVQLVESGGGLVQPGGSLRLSCAASGLTFDDNIHVMGWFPQAPGKEREFVAAIHWSGGSTIYADSVKGRFTINADNSKNTAYLQMNSLKPEDTAVYYCAADVYPQDYGLGYVEGKMYYGMDWGQGTLVTVSS

SEQ ID NO: 3259 - protein, 116 aa, Artificial Sequence
  Description of Artificial Sequence: Synthetic polypeptide
EVQLVESGGGLVQPGGSLRLSCAASGLTLDYYAMGWFRQAPGKEREWVASINWSGGSTYYADSVKGRFTISADNSKNTAYLQMNSLKPEDTAVYYCAAYGSGEFDWGQGTLVTVSS

SEQ ID NO: 3260 - protein, 114 aa, Artificial Sequence
  Description of Artificial Sequence: Synthetic polypeptide
EVQLVESGGGLVQPGGSLRLSCAASGRTIVPYTMGWFRQAPGKERELVAAISPSAFTEYADSVKGRFTISADNSKNTAYLQMNSLKPEDTAVYYCAARRWGYDWGQGTLVTVSS

SEQ ID NO: 3261 - protein, 123 aa, Artificial Sequence
  Description of Artificial Sequence: Synthetic polypeptide
EVQLVESGGGLVQPGGSLRLSCAASGGTFTTYHMGWFRQAPGKEREFVAHISTGGATNYADSVKGRFTISADNSKNTAYLQMNSLKPEDTAVYYCATFPAIVTDSDYDLGNDWGQGTLVTVSS

SEQ ID NO: 3262 - protein, 124 aa, Artificial Sequence
  Description of Artificial Sequence: Synthetic polypeptide
EVQLVESGGGLVQPGGSLRLSCAASGFTFNVFAMGWFRQAPGKEREFVAAINWSDSRTDYADSVKGRFTISADNSKNTAYLQMNSLKPEDTAVYYCASGSDNRARELSRYEYVWGQGTLVTVSS

SEQ ID NO: 3263 - protein, 117 aa, Artificial Sequence
  Description of Artificial Sequence: Synthetic polypeptide
EVQLVESGGGLVQPGGSLRLSCAASGSIFSIDVMGWFRQAPGKEREFVAAISWSGESTLYADSVKGRFTISADNSKNTAYLQMNSLKPEDTAVYYCAAFDGYSGSDWGQGTLVTVSS

SEQ ID NO: 3264 - protein, 117 aa, Artificial Sequence
  Description of Artificial Sequence: Synthetic polypeptide
EVQLVESGGGLVQPGGSLRLSCAASGFTFSSYSMGWFRQAPGKEREFVAAISSYSHTAYADSVKGRFTIIADNSKNTAYLQMNSLKPEDTAVYYCALQPFGASSYRWGQGTLVTVSS

SEQ ID NO: 3265 - protein, 117 aa, Artificial Sequence
  Description of Artificial Sequence: Synthetic polypeptide
EVQLVESGGGLVQPGGSLRLSCAASGNTFSINVMGWFRQAPGKEREFVAAIHWSGDSTLYADSGKGRFTIIADNNKNTAYLQMISLKPEDTAVYYCAAFDGYSGNHWGQGTLVTVSS

SEQ ID NO: 3266 - protein, 123 aa, Artificial Sequence
  Description of Artificial Sequence: Synthetic polypeptide
EVQLVESGGGLVQPGGSLRLSCAASGRTISSYIMGWFRQAPGKERELVARIYTGGDTIYADSVKGRFTISADNSKNTAYLQMNSLKPEDTAVYYCAARTSYNGRYDYIDDYSWGQGTLVTVSS

SEQ ID NO: 3267 - protein, 122 aa, Artificial Sequence
  Description of Artificial Sequence: Synthetic polypeptide
EVQLVESGGGLVQPGGSLRLSCAASGRANSINWMGWFRQAPGKEREFVATITPGGNTNYADSVKGRFTISADNSKNTAYLQMNSLKPEDTAVYYCAAAAGSTWYGTLYEYDWGQGTLVTVSS

SEQ ID NO: 3268 - protein, 113 aa, Artificial Sequence
  Description of Artificial Sequence: Synthetic polypeptide
EVQLVESGGGLVQPGGSLRLSCAASGGTFSVFAMGWFRQVPGKERELVAEITAGGSTYYADSVKGRFTISADNSKNTAYLQMNSLKPEDTAVYYCAVDGPFGWGQGTLVTVSS

SEQ ID NO: 3269 - protein, 115 aa, Artificial Sequence
  Description of Artificial Sequence: Synthetic polypeptide
EVQLVESGGGLVQPGGSLRLSCAASGFTFDDYPMGWFRQAPGKEREGVASVLRGGYTWYADSVKGRFTISADNSKNTAYLQMNSLKPEDTAVYYCAKDWATGLAWGQGTLVTVSS

SEQ ID NO: 3270 - protein, 120 aa, Artificial Sequence
  Description of Artificial Sequence: Synthetic polypeptide
EVQLVESGGGLVQPGGSLRLSCAASGFALGYYAMGWFRQAPGKEREFVAGIRWTDAYTEYADSVKGRFTISADNSKNTAYLQMNSLKPEDTAVYYCAADVSPSYGSRWYWGQGTLVTVSS

SEQ ID NO: 3271 - protein, 117 aa, Artificial Sequence
  Description of Artificial Sequence: Synthetic polypeptide
EVQLVESGGGLVQPGGSLRLSCAASGRTLDIHVMGWFRQAPGKEREFVAVINWTGESTLYADSVKGRFTISADNSKNTAYLQMNSLKPEDTAVYYCAAFDGYTGNYWGQGTLVTVSS

SEQ ID NO: 3272 - protein, 118 aa, Artificial Sequence
  Description of Artificial Sequence: Synthetic polypeptide
EVQLVESGGGLVQPGGSLRLSCAASGFTPDNYAMGWFRQAPGKEREFVAALGWSGVTTYHYYADSVKGRFTISADNSKNTAYLQMNSLKPEDTAVYYCASDESDAANWGQGTLVTVSS

SEQ ID NO: 3273 - protein, 114 aa, Artificial Sequence
  Description of Artificial Sequence: Synthetic polypeptide
EVQLVESGGGLVQPGGSLRLSCAASGFTFDDYAMGWFRQAPGKERELVATIMWSGNTTYYADSVRRRFIIRDNNNKNTAHLQMNSLKPEDTAVYYCATNDDDVWGQGTLVTVSS

SEQ ID NO: 3274 - protein, 124 aa, Artificial Sequence
  Description of Artificial Sequence: Synthetic polypeptide
EVQLVESGGGLVQPGGSLRLSCAASGRTFSRYIMGWFRQAPGKEREFVAAISWSGGDNTYYADSVKGRFTISADNSKNTAYLQMNSLKPEDTAVYYCAAYRIVVGGTSPGDWRWGQGTLVTVSS

SEQ ID NO: 3275 - protein, 117 aa, Artificial Sequence
  Description of Artificial Sequence: Synthetic polypeptide
EVQLVESGGGLVQPGGSLRLSCAASGPTFSIYAMGWFRQAPGKERELVAGISWNGGSTNYADSVKGRFTISADNSKNTAYLQMNSLKPEDTAVYYCALRRRFGGQEWGQGTLVTVSS

SEQ ID NO: 3276 - protein, 116 aa, Artificial Sequence
  Description of Artificial Sequence: Synthetic polypeptide
EVQLVESGGGLVQPGGSLRLSCAASGRTFSLNAMGWFRQAPGKERELVAAISCGGGSTYADNGKGRFTIITDNSKNTAYLQMMNLKPEDTAAYYCAADNDMGYCSWGQGTLVTVSS

SEQ ID NO: 3277 - protein, 123 aa, Artificial Sequence
  Description of Artificial Sequence: Synthetic polypeptide
EVQLVESGGGLVQPGGSLRLSCAASGSTFSINAMGWFRQAPGKEREFVGGISRSGATTNYADSVKGRFTISADNSKNTAYLQMNSLKPEDTAVYYCAADGVPEYSDYASGPVWGQGTLVTVSS

SEQ ID NO: 3278 - protein, 120 aa, Artificial Sequence
  Description of Artificial Sequence: Synthetic polypeptide
EVQLVESGGGLVQPGGSLRLSCAASGRTFSMHAMGWFRQAPGKERELVASISSQGRTNYADSVKGRFTISADNSKNTAYLQMNSLKPEDTAVYYCAAEVRNGSDYLPIDWGQGTLVTVSS

SEQ ID NO: 3279 - protein, 115 aa, Artificial Sequence
  Description of Artificial Sequence: Synthetic polypeptide
EVQLVESGGGLVQPGGSLRLSCAASGVTLDLYAMGWFRQAPGKEREFVAGIRWTDAYTEYADSVKGRFTISADNSKNTAYLQMNSLKPEDTAVYYCAVDIDYRDWGQGTLVTVSS

SEQ ID NO: 3280 - protein, 117 aa, Artificial Sequence
  Description of Artificial Sequence: Synthetic polypeptide
EVQLVESGGGLVQPGGSLRLSCAASGLPFTINVMGWFRQAPGKEREFVAAIHWSGLTTFYADSVKGLFTITEDNSKNTAHLMMNLLKPEDTAVYCCAELDGYFFAHWGQGTLVTVSS

SEQ ID NO: 3281 - protein, 123 aa, Artificial Sequence
  Description of Artificial Sequence: Synthetic polypeptide
EVQLVESGGGLVQPGGSLRLSCAASGRAFSNYAMGWFRQAPGKEREFVAWINNRGTTDYADSGSTYYADSVKGRFTISADNSKNTAYLQMNSLKPEDTAVYYCASTDDYGVDWGQGTLVTVSS

SEQ ID NO: 3282 - protein, 120 aa, Artificial Sequence
  Description of Artificial Sequence: Synthetic polypeptide
EVQLVESGGGLVQPGGSLRLSCAASGFTPDDYAMGWFRQAPGKEREFVASIGYSGRSNSYNYYADSVKGRFTISADNSKNTAYLQMNSLKPEDTAVYYCAIAHGSSTYNWGQGTLVTVSS

SEQ ID NO: 3283 - protein, 117 aa, Artificial Sequence
  Description of Artificial Sequence: Synthetic polypeptide
EVQLVESGGGLVQPGGSLRLSCAASGFTLNYYGMGWFPQAPGKEREFVAAITSGGAPHYADSVKGRFTINADNSKNTAYLQMNSLKPEDTAVYYCASAYDRGIGYDWGQGTLVTVSS

SEQ ID NO: 3284 - protein, 122 aa, Artificial Sequence; identical to SEQ ID NO: 3004
  Description of Artificial Sequence: Synthetic polypeptide

SEQ ID NO: 3285 - protein, 117 aa, Artificial Sequence
  Description of Artificial Sequence: Synthetic polypeptide
EVQLVESGGGLVQPGGSLRLSCAASGRTFSINAMGWFPQAPGKERELVAAISWSGESTQYADSVKGRFTISADNSKNTAYLQMNSLKPEDTAVYYCAAFDGGSGTQWGQGTLVTVSS

SEQ ID NO: 3286 - protein, 117 aa, Artificial Sequence
  Description of Artificial Sequence: Synthetic polypeptide
EVQLVESGGGLVQPGGSLRLSCAASGEEFSDHWMGWFRQAPGKEREFVAAIHWSGDSTHRNYADSVKGRFTISADNSKNTAYLQMNSLKPEDTAVYYCATVGITLNWGQGTLVTVSS

SEQ ID NO: 3287 - protein, 118 aa, Artificial Sequence; identical to SEQ ID NO: 3000
  Description of Artificial Sequence: Synthetic polypeptide

SEQ ID NO: 3288 - protein, 115 aa, Artificial Sequence
  Description of Artificial Sequence: Synthetic polypeptide
EVQLVESGGGLVQPGGSLRLSCAASGLPLDLYAMGWFPPAPGKELEFVAGIRWSDAYTEYADSVKGRFTINADNSKNPANLQMNSLKPEDTAVYYCALDIDYRHWGQGTLVTVSS

SEQ ID NO: 3289 - protein, 121 aa, Artificial Sequence
  Description of Artificial Sequence: Synthetic polypeptide
EVQLVESGGGLVQPGGSLRLSCAASGRTSTVNGMGWFRQAPGKEREFVASISQSGAATAYADSVKGRFTISADNSKNTAYLQMNSLKPEDTAVYYCAADRTYSYSSTGYYWGQGTLVTVSS

SEQ ID NO: 3290 - protein, 117 aa, Artificial Sequence; identical to SEQ ID NO: 3010
  Description of Artificial Sequence: Synthetic polypeptide

SEQ ID NO: 3291 - protein, 122 aa, Artificial Sequence
  Description of Artificial Sequence: Synthetic polypeptide
EVQLVESGGGLVQPGGSLRLSCAASGRPNSINWMGWFRQAPGKERQFVATITPGGNTNYADSVKGRFTISADNSKNTAYLLMNSLKPEDTAVYYCAAAAGTTWYGTLYEYDWGQGTLVTVSS

SEQ ID NO: 3292 - protein, 122 aa, Artificial Sequence
  Description of Artificial Sequence: Synthetic polypeptide
EVQLVESGGGLVQPGGSLRLSCAASGEKFSDHWMGWFRQAPGKEREFVATITFSGARTAYADSVKGRFTISADNSKNTAYLQMNSLKPEDTAVYYCAALIKPSSTDRIFEEWGQGTLVTVSS

SEQ ID NO: 3293 - protein, 115 aa, Artificial Sequence
  Description of Artificial Sequence: Synthetic polypeptide
EVQLVESGGGLVQPGGSLRLSCAASGLTVVPYAMGWFRQAPGKEREFVAAIRRSAVTNYADSVKGRFTIIADNSKNTAYLLMNSLKPEDTAVYYCAARRWGYHYWGQGTLVTVSS

SEQ ID NO: 3294 - protein, 117 aa, Artificial Sequence
  Description of Artificial Sequence: Synthetic polypeptide
EVQLVESGGGLVQPGGSLRLSCAASGTTFNFNVMGWFRQAPGKERELVAVISWTGESTLYADSVKGRFTISADNSKNTAYLQMNSLKPEDTAVYYCAAFDGYTGRDWGQGTLVTVSS

SEQ ID NO: 3295 - protein, 123 aa, Artificial Sequence
  Description of Artificial Sequence: Synthetic polypeptide
EVQLVESGGGLVQPGGSLRLSCAASGIDVNRNAMGWFRQAPGKEREFVAAITWSGGWRYYADSVKGRFTISADNSKNTAYLQMNSLKPEDTAVYYCATTFGDAGIPDQYDFGWGQGTLVTVSS

SEQ ID NO: 3296 - protein, 111 aa, Artificial Sequence
  Description of Artificial Sequence: Synthetic polypeptide
EVQLVESGGGLVQPGGSLRLSCAASGRTFSSNMGWFRQAPGKEREFVARIFGGDRTLYADSVKGRFTISADNSKNTAYLQMNSLKPEDTAVYYCADINGDWGQGTLVTVSS

SEQ ID NO: 3297 - protein, 111 aa, Artificial Sequence
  Description of Artificial Sequence: Synthetic polypeptide
EVQLVESGGGLVQPGGSLRLSCAASGGTFSMGWIRWVPQAQGKELEFMGCIGWITYYADYAKSRFSLFTDNADNTKNPPNMHMNPQKPEDTAVYYCAPFGWGQGTLVTVSS

SEQ ID NO: 3298 - protein, 120 aa, Artificial Sequence
  Description of Artificial Sequence: Synthetic polypeptide
EVQLVESGGGLVQPGGSLRLSCAASGCTLDYYAMGWFRQAPGKEREFVAGIRWTDAYTEYADSVKGRFTISADNSKNTAYLQMNSLKPEDTAVYYCAADVSPSYGGRWYWGQGTLVTVSS

SEQ ID NO: 3299 - protein, 124 aa, Artificial Sequence
  Description of Artificial Sequence: Synthetic polypeptide
EVQLVESGGGLVQPGGSLRLSCAASGLTFSLYRMCWFRQAPGKEREEVSCISNIDGSTYYADSVKGRFTISADNSKNTAYLQMNSLKPEDTAVYYCAADLLGDSDYEPSSGFGWGQGTLVTVSS

SEQ ID NO: 3300 - protein, 120 aa, Artificial Sequence
  Description of Artificial Sequence: Synthetic polypeptide
EVQLVESGGGLVQPGGSLRLSCAASGRSFSSHRMGWFRQAPGKEREFVAAIMWSGSHRNYADSVKGRFTISADNSKNTAYLQMNSLKPEDTAVYYCAAIAYEEGVYRWDWGQGTLVTVSS

SEQ ID NO: 3301 - protein, 114 aa, Artificial Sequence
  Description of Artificial Sequence: Synthetic polypeptide
EVQLVESGGGLVQPGGSLRLSCAASGRIIVPNTMGWFRQAPGKERERVTGISPSAFTEYADSVKGRFTISADNSKNTAYLQMNSLKPEDTAVYYCAAHGWGCHWGQGTLVTVSS

SEQ ID NO: 3302 - protein, 122 aa, Artificial Sequence
  Description of Artificial Sequence: Synthetic polypeptide
EVQLVESGGGLVQPGGSLRLSCAASGSIFIISMGWFRQAPGKEHEFVTGINWSGGSTTYADSVKGRFTINADNSKNTAYLQMNSLKPEDTAVYYCAASAIGSGALRRFEYDWGQGTLVTVSS

SEQ ID NO: 3303 - protein, 120 aa, Artificial Sequence
  Description of Artificial Sequence: Synthetic polypeptide
EVQLVESGGGLVQPGGSLRLSCAASGFSLDYYDMGWFRQAPGKEREFVAALGWSGGSTDYADSVKGRFTISADNSKNTAYLQMNSLKPEDTAVYYCAAGNGGRYGIVERWGQGTLVTVSS

SEQ ID NO: 3304 - protein, 122 aa, Artificial Sequence
  Description of Artificial Sequence: Synthetic polypeptide
EVQLVESGGGLVQPGGSLRLSCAASGTSISNRVMGWFRQAPGKERELVARIYTGGDTLYADSVKGRFTISADNSKNTAYLQMNSLKPEDTAVYYCAARKIYRSLSYYGDYDWGQGTLVTVSS

SEQ ID NO: 3305 - protein, 119 aa, Artificial Sequence
  Description of Artificial Sequence: Synthetic polypeptide
EVQLVESGGGLVQPGGSLRLSCAASGNIDRLYAMGWFRQAPGKEREGVAAIDSDGSTDYADSVKGRFTISADNSKNTAYLQMNSLKPEDTAVYYCAALIDYGLGFPIEWGQGTLVTVSS

SEQ ID NO: 3306 - protein, 117 aa, Artificial Sequence
  Description of Artificial Sequence: Synthetic polypeptide
EVQLVESGGGLVQPGGSLRLSCAASGNTFTINVMGWFRQAPGKEREFVAAINWNGGTTLYADSVKGRFTISADNSKNTAYLQMNSLKPEDTAVYYCAAFDGYSGIDWGQGTLVTVSS

SEQ ID NO: 3307 - protein, 115 aa, Artificial Sequence; identical to SEQ ID NO: 15
  Description of Artificial Sequence: Synthetic polypeptide

SEQ ID NO: 3308 - protein, 125 aa, Artificial Sequence
  Description of Artificial Sequence: Synthetic polypeptide
EVQLVESGGGLVQPGGSLRLSCAASGFTFDHYTMGWFRQAPGKEREFVAAISGSENVTSYADSVKGRFTISADNSKNTAYLQMNSLKPEDTAVYYCAAEPYIPVRTMRHMTFLTWGQGTLVTVSS

SEQ ID NO: 3309 - protein, 115 aa, Artificial Sequence
  Description of Artificial Sequence: Synthetic polypeptide
EVQLVESGGGLVQPGGSLRLSCAASGRTFGNYNMGWFRQAPGKEREFVATINSLGGTSYADSVKGRFTISADNSKNTAYLQMNSLKPEDTAVYYCARVDYYMDVWGQGTLVTVSS

SEQ ID NO: 3310 - protein, 118 aa, Artificial Sequence
  Description of Artificial Sequence: Synthetic polypeptide
EVQLVESGGGLVQPGGSLRLSCAASGFTMSSSWMGWFRQAPGKEREFVTVISGVGTSYADSVKGRFTISADNSKNTAYLQMNSLKPEDTAVYYCARGPDSSGYGFDYWGQGTLVTVSS

SEQ ID NO: 3311 - protein, 115 aa, Artificial Sequence
  Description of Artificial Sequence: Synthetic polypeptide
EVQLVESGGGLVQPGGSLRLSCAASGFTFSPSWMGWFRQAPGKEREFVATINEYGGRNYADSVKGRFTISADNSKNTAYLQMNSLKPEDTAVYYCARVDRDFDYWGQGTLVTVSS

SEQ ID NO: 3312 - protein, 121 aa, Artificial Sequence
  Description of Artificial Sequence: Synthetic polypeptide
EVQLVESGGGLVQPGGSLRLSCAASGFTRDYYTMGWFRQAPGKEREFVAAISRSGSLTSYADSVKGRFTISADNSKNTAYLQMNSLKPEDTAVYYCANLAYYDSSGYYDYWGQGTLVTVSS

SEQ ID NO: 3313 - protein, 112 aa, Artificial Sequence
  Description of Artificial Sequence: Synthetic polypeptide
EVQLVESGGGLVQPGGSLRLSCAASGRTFTMGWFRQAPGKEREFVASTNSAGSTNYADSVNGRFTISADNSKNTAYLQMNSLKPEDTAVYYCTTVDQYFDYWGQGTLVTVSS

SEQ ID NO: 3314 - protein, 119 aa, Artificial Sequence
  Description of Artificial Sequence: Synthetic polypeptide
EVQLVESGGGLVQPGGSLRLSCAASGTTLDYYAMGWFRQAPGKERELVAAISWSGGSTAYADSVKGRFTISADNSKNTAYLQMNSLKPEDTAVYYCAREDYYDSSGYSWGQGTLVTVSS

SEQ ID NO: 3315 - protein, 115 aa, Artificial Sequence
  Description of Artificial Sequence: Synthetic polypeptide
EVQLVESGGGLVQPGGSLRLSCAASGFTFSSYWMGWFRQAPGKEREFVATINWSGVTAYADSVKGRFTISADNSKNTAYLQMNSLKPEDTAVYYCARADDYFDYWGQGTLVTVSS

SEQ ID NO: 3316 - protein, 126 aa, Artificial Sequence
  Description of Artificial Sequence: Synthetic polypeptide
  MOD_RES (63)..(63): Any amino acid
EVQLVESGGGLVQPGGSLRLSCAASGFTLSGIWMGWFLQAPGKEHEFVAIITTGGRTTYADSXKGRFTSSSDNSKNTAYLQMNLLKPEDTAEYYCAGYSTFGSSSAYYYYSMDVGWGQGTLVTVSS

SEQ ID NO: 3317 - protein, 114 aa, Artificial Sequence; identical to SEQ ID NO: 3044
  Description of Artificial Sequence: Synthetic polypeptide

SEQ ID NO: 3318 - protein, 125 aa, Artificial Sequence
  Description of Artificial Sequence: Synthetic polypeptide
EVQLVESGGGLVQPGGSLRLSCAASGSIASIHAMGWFRQAPGKEREFVAAISRSGGFGSYADSVKGRFTISADNSKNTAYLQMNSLKPEDTAVYYCARDDKYYDSSGYPAYFQHWGQGTLVTVSS

SEQ ID NO: 3319 - protein, 113 aa, Artificial Sequence
  Description of Artificial Sequence: Synthetic polypeptide
EVQLVESGGGLVQPGGSLRLSCAASGLAFNAYAMGWFRQAPGKEREEVATIGWSGANTYYADSVKGRFTISADNSKNTAYLQMNSLKPEDTAVYYCASDPPGWGQGTLVTVSS

SEQ ID NO: 3320 - protein, 116 aa, Artificial Sequence
  Description of Artificial Sequence: Synthetic polypeptide
EVQLVESGGGLVQPGGSLRLSCAASGSTYTTYSMGWFRQAPGKEREFVAAISGSENVTSYADSVKGRFTISADNSKNTAYLQMNSLKPEDTAVYYCARVDDYMDVWGQGTLVTVSS

SEQ ID NO: 3321 - protein, 123 aa, Artificial Sequence
  Description of Artificial Sequence: Synthetic polypeptide
EVQLVESGGGLVQPGGSLRLSCAASGLTFNDYAMGWFRQAPGKEREFVAHIPRSTYSPYYADSVKGRFTISADNSKNTAYLQMNSLKPEDTAVYYCAFLVGPQGVDHGAFDVWGQGTLVTVSS

SEQ ID NO: 3322 - protein, 116 aa, Artificial Sequence
  Description of Artificial Sequence: Synthetic polypeptide
EVQLVESGGGLVQPGGSLRLSCAASGITFRFKAMGWFRQAPGKEREFVAAVSWDGRNTYYADSVKGRFTISADNSKNTAYLQMNSLKPEDTAVYYCASDYYYMDVWGQGTLVTVSS

SEQ ID NO: 3323 - protein, 118 aa, Artificial Sequence
  Description of Artificial Sequence: Synthetic polypeptide
EVQLVESGGGLVQPGGSLRLSCAASGSTVLINAMGWFRQAPGKEREFVAAVRWSDDYTYYADSVKGRFTISADNSKNTAYLQMNSLKPEDTAVYYCAKEGRAGSLDYWGQGTLVTVSS

SEQ ID NO: 3324 - protein, 123 aa, Artificial Sequence
  Description of Artificial Sequence: Synthetic polypeptide
EVQLVESGGGLVQPGGSLRLSCAASGFTFDDAAMGWFRQAPGKEREFVAHISWSGGSTYYADSVKGRFTISADNSKNTAYLQMNSLKPEDTAVYYCATFGATVTATNDAFDIWGQGTLVTVSS

SEQ ID NO: 3325 - protein, 123 aa, Artificial Sequence
  Description of Artificial Sequence: Synthetic polypeptide
EVQLVESGGGLVQPGGSLRLSCAASGNTGSTGYMGWFRQAPGKEREMVAGVINDGSTVYADSVKGRFTISADNSKNTAYLQMNSLKPEDTAVYYCARLATSHQDGTGYLFDYWGQGTLVTVSS

SEQ ID NO: 3326 - protein, 125 aa, Artificial Sequence
  Description of Artificial Sequence: Synthetic polypeptide
EVQLVESGGGLVQPGGSLRLSCAASGLTFRNYAMGWFRQAPGKEREFIAGMMWSGGTTTYADSVKGRFTISADNSKNTAYLQMNSLKPEDTAVYYCAREGYYYDSSGYLNYFDYWGQGTLVTVSS

SEQ ID NO: 3327 - protein, 120 aa, Artificial Sequence
  Description of Artificial Sequence: Synthetic polypeptide
EVQLVESGGGLVQPGGSLRLSCAASGSILSIAVMGWFRQAPGKEREFVAAISPSAVTTYYADSVKGRFTISADNSKNTAYLQMNSLKPEDTAVYYCAIGYYDSSGYFDYWGQGTLVTVSS

SEQ ID NO: 3328 - protein, 124 aa, Artificial Sequence
  Description of Artificial Sequence: Synthetic polypeptide
EVQLVESGGGLVQPGGSLRLSCAASGSTLPYHAMGWFRQAPGKEREFVAAITWNGASTSYADSVKGRFTISADNSKNTAYLQMNSLKPEDTAVYYCARDRYYDTSASYFESETWGQGTLVTVSS

SEQ ID NO: 3329 - protein, 122 aa, Artificial Sequence
  Description of Artificial Sequence: Synthetic polypeptide
EVQLVESGGGLVQPGGSLRLSCAASGTLFKINAMGWFRQAPGKEREFVAAITSSGSNIDYTYYADSVKGRFTISADNSKNTAYLQMNSLKPEDTAVYYCARSNTGWYSFDYWGQGTLVTVSS

SEQ ID NO: 3330 - protein, 117 aa, Artificial Sequence
  Description of Artificial Sequence: Synthetic polypeptide
EVQLVESGGGLVQPGGSLRLSCAASGRTFSEVVMGWFRQAPGKEREFVATIHSSGSTSYADSVKGRFTISADNSKNTAYLQMNSLKPEDTAVYYCVRVTSDYSMDSWGQGTLVTVSS

SEQ ID NO: 3331 - protein, 119 aa, Artificial Sequence
  Description of Artificial Sequence: Synthetic polypeptide
EVQLVESGGGLVQPGGSLRLSCAASGSIFSMNTMGWFRQAPGKEREFVALINRSGGGINYADSVKGRFTISADNSKNTAYLQMNSLKPEDTAVYYCVRLSSGYYDFDYWGQGTLVTVSS

SEQ ID NO: 3332 - protein, 128 aa, Artificial Sequence; identical to SEQ ID NO: 61
  Description of Artificial Sequence: Synthetic polypeptide

SEQ ID NO: 3333 - protein, 122 aa, Artificial Sequence
  Description of Artificial Sequence: Synthetic polypeptide
EVQLVESGGGLVQPGGSLRLSCAASGLTFGTYTMGWFRQAPGKEREFVAAISRFGSTYYADSVKGRFTISADNSKNTAYLQMNSLKPEDTAVYYCARGGDYDFWSVDYMDVWGQGTLVTVSS

SEQ ID NO: 3334 - protein, 115 aa, Artificial Sequence
  Description of Artificial Sequence: Synthetic polypeptide
EVQLVESGGGLVQPGGSLRLSCAASGDTFSTSWMGWFRQAPGKEREFVATINTGGGTNYADSVKGRFTISADNSKNTAYLQMNSLKPEDTAVYYCARVTTSFDYWGQGTLVTVSS

SEQ ID NO: 3335 - protein, 115 aa, Artificial Sequence
  Description of Artificial Sequence: Synthetic polypeptide
EVQLVESGGGLVQPGGSLRLSCAASGITFRFKAMGWFRQAPGKEREFVASISRSGTTYYADSVKGRFTISADNSKNTAYLQMNSLKPEDTAVYYCATDYSAFDMWGQGTLVTVSS

SEQ ID NO: 3336 - protein, 118 aa, Artificial Sequence
  Description of Artificial Sequence: Synthetic polypeptide
EVQLVESGGGLVQPGGSLRLSCAASGDTYGSYWMGWFRQAPGKEREFVATITSDDRTNYADSVKGRFTISADNSKNTAYLQMNSLKPEDTAVYYCARVTSSLSGMDVWGQGTLVTVSS

SEQ ID NO: 3337 - protein, 120 aa, Artificial Sequence
  Description of Artificial Sequence: Synthetic polypeptide
  MOD_RES (47)..(47): Any amino acid
EVQLVESGGGLVQPGGSLRLSCAASGYTLKNYYAMGWFRQAPGKERXLVAAIIWTGESTLDADSVKGRFTISADNSKNTAYLQMNSLKPEDTAVYYCAREGYYDSSGYYWGQGTLVTVSS

SEQ ID NO: 3338 - protein, 115 aa, Artificial Sequence
  Description of Artificial Sequence: Synthetic polypeptide
EVQLVESGGGLVQPGGSLRLSCAASGFAFGDSWMGWFRQAPGKEREFVATINWSGVTAYADSVKGRFTISADNSKNTAYLQMNSLKPEDTAVYYCARADGYFDYWGQGTLVTVSS

SEQ ID NO: 3339 - protein, 119 aa, Artificial Sequence
  Description of Artificial Sequence: Synthetic polypeptide
EVQLVESGGGLVQPGGSLRLSCAASGDTFSANRMGWFRQAPGKEREFVASITWSSANTYYADSVKGRFTISADNSKNTAYLQMNSLKPEDTAVYYCATFNWNDEGFDFWGQGTLVTVSS

SEQ ID NO: 3340 - protein, 124 aa, Artificial Sequence
  Description of Artificial Sequence: Synthetic polypeptide
EVQLVESGGGLVQPGGSLRLSCAASGFTLDYYDMGWFRQAPGKEREFVALISWSGGSTYYADSVKGRFTISADNSKNTAYLQMNSLKPEDTAVYYCATDFYGWGTRERDAFDIWGQGTLVTVSS

SEQ ID NO: 3341 - protein, 119 aa, Artificial Sequence
  Description of Artificial Sequence: Synthetic polypeptide
EVQLVESGGGLVQPGGSLRLSCAASGTFQRINHMGWFRQAPGKEREFVATINTGGQPNYADSVKGRFTISADNSKNTAYLQMNSLKPEDTAVYYCASLIAAQDYYFDYWGQGTLVTVSS

SEQ ID NO: 3342 - protein, 119 aa, Artificial Sequence
  Description of Artificial Sequence: Synthetic polypeptide
EVQLVESGGGLVQPGGSLRLSCAASGSAFRSNAMGWFRQAPGKEREFVAHISWSSKSTYYADSVKGRFTISADNSKNTAYLQMNSLKPEDTAVYYCATYCSSTSCFDYWGQGTLVTVSS

SEQ ID NO: 3343 - protein, 119 aa, Artificial Sequence
  Description of Artificial Sequence: Synthetic polypeptide
EVQLVESGGGLVQPGGSLRLSCAASGFTLAYYAMGWFRQAPGKEREFVAAISMSGDDTIYADSVKGRFTISADNSKNTAYLQMNSLKPEDTAVYYCARELGYSSTVWPWGQGTLVTVSS

SEQ ID NO: 3344 - protein, 123 aa, Artificial Sequence
  Description of Artificial Sequence: Synthetic polypeptide
EVQLVESGGGLVQPGGSLRLSCAASGFDFSVSWMGWFRQAPGKEREFVTAITWSGDSTNYADSVKGRFTISADNSKNTAYLQMNSLKPEDTAVYYCASLLHTGPSGGNYFDYWGQGTLVTVSS

SEQ ID NO: 3345 - protein, 118 aa, Artificial Sequence
  Description of Artificial Sequence: Synthetic polypeptide
EVQLVESGGGLVQPGGSLRLSCAASGHTFSTSWMGWFRQAPGKEREFVATINSLGGTNYADSVKGRFTISADNSKNTAYLQMNSLKPEDTAVYYCARVSSGDYGMDVWGQGTLVTVSS

SEQ ID NO: 3346 - protein, 115 aa, Artificial Sequence
  Description of Artificial Sequence: Synthetic polypeptide
EVQLVESGGGLVQPGGSLRLSCAASGNTFSGGFMGWFRQAPGKEREFVAVISSLSSKSYADSVKGRFTISADNSKNTAYLQMNSLKPEDTAVYYCAKVDSGYDYWGQGTLVTVSS

SEQ ID NO: 3347 - protein, 125 aa, Artificial Sequence
  Description of Artificial Sequence: Synthetic polypeptide
EVQLVESGGGLVQPGGSLRLSCAASGFTFSPSWMGWFRQAPGKEREFVAAISWSGGSTAYADSVKGRFTISADNSKNTAYLQMNSLKPEDTAVYYCHGLGEGDPYGDYEGYFDLWGQGTLVTVSS

SEQ ID NO: 3348 - protein, 120 aa, Artificial Sequence
  Description of Artificial Sequence: Synthetic polypeptide
EVQLVESGGGLVQPGGSLRLSCAASGFTFSDYWMGWFRQAPGKERELVARVWWNGGSAYYADSVKGRFTISADNSKNTAYLQMNSLKPEDTAVYYCAREVLRQQVVLDYWGQGTLVTVSS

SEQ ID NO: 3349 - protein, 128 aa, Artificial Sequence
  Description of Artificial Sequence: Synthetic polypeptide
EVQLVESGGGLVQPGGSLRLSCAASGFTFSTSWMGWFRQAPGKEREFVASINEYGGRNYADSVKGRFTISADNSKNTAYLQMNSLKPEDTAVYYCAGLHYYYDSSGYNPTEYYGMDVWGQGTLVTVSS

SEQ ID NO: 3350 - protein, 119 aa, Artificial Sequence
  Description of Artificial Sequence: Synthetic polypeptide
EVQLVESGGGLVQPGGSLRLSCAASGDTYGSYWMGWFRQAPGKEREFVAVITSGGSTNYADSVKGRFTISADNSKNTAYLQMNSLKPEDTAVYYCTHVQNSYYYAMDVWGQGTLVTVSS

SEQ ID NO: 3351 - protein, 127 aa, Artificial Sequence
  Description of Artificial Sequence: Synthetic polypeptide
EVQLVESGGGLVQPGGSLRLSCAASGRTFSSYAMMGWFRQAPGKEREFVASVNWDASQINYADSVKGRFTISADNSKNTAYLQMNSLKPEDTAVYYCTTLGAVYFDSSGYHDYFDYWGQGTLVTVSS

SEQ ID NO: 3352 - protein, 120 aa, Artificial Sequence
  Description of Artificial Sequence: Synthetic polypeptide
EVQLVESGGGLVQPGGSLRLSCAASGGTFGVYHMGWFRQAPGKEREFIGRITWTDGSTYYADSVKGRFTISADNSKNTAYLQMNSLKPEDTAVYYCFGLLEVYDMTFDYWGQGTLVTVSS

SEQ ID NO: 3353 - protein, 121 aa, Artificial Sequence
  Description of Artificial Sequence: Synthetic polypeptide
EVQLVESGGGLVQPGGSLRLSCAASGNMFSINAMGWFRQAPGKEREFVTLISWSSGRTSYADSVKGRFTISADNSKNTAYLQMNSLKPEDTAVYYCASLGYCSGGSCFDYWGQGTLVTVSS

SEQ ID NO: 3354 - protein, 118 aa, Artificial Sequence
  Description of Artificial Sequence: Synthetic polypeptide
EVQLVESGGGLVQPGGSLRLSCAASGLTFSAMGWFRQAPGKEREFVALIRRDGSTIYADSVKGRFTISADNSKNTAYLQMNSLKPEDTAVYYCAALGILFGYDAFDIWGQGTLVTVSS

SEQ ID NO: 3355 - protein, 123 aa, Artificial Sequence
  Description of Artificial Sequence: Synthetic polypeptide
EVQLVESGGGLVQPGGSLRLSCAASGRTFSMHAMGWFRQAPGKERELVASITYGGNINYADSVKGRFTISADNSKNTAYLQMNSLKPEDTAVYYCAKEGYYDSTGYRTYFQQWGQGTLVTVSS

SEQ ID NO: 3356 - protein, 117 aa, Artificial Sequence
  Description of Artificial Sequence: Synthetic polypeptide
EVQLVESGGGLVQPGGSLRLSCAASGFTVSNYAMGWFRQAPGKEREFVASVNWSGGTTSYADSVKGRFTISADNSKNTAYLQMNSLKPEDTAVYYCATTGTVTLGYWGQGTLVTVSS

SEQ ID NO: 3357 - protein, 121 aa, Artificial Sequence
  Description of Artificial Sequence: Synthetic polypeptide
EVQLVESGGGLVQPGGSLRLSCAASGSTVLINAMGWFRQAPGKEREFVAAISWSPGRTDYADSVKGRFTISADNSKNTAYLQMNSLKPEDTAVYYCARDCSGGSCYSGDYWGQGTLVTVSS

SEQ ID NO: 3358 - protein, 117 aa, Artificial Sequence
  Description of Artificial Sequence: Synthetic polypeptide
EVQLVESGGGLVQPGGSLRLSCAASGFSFDRWAMGWFRQAPGKEREWVASLATGGNTNYADSVKGRFTISADNSKNTAYLQMNSLKPEDTAVYYCARVTNYDAFDIWGQGTLVTVSS

SEQ ID NO: 3359 - protein, 122 aa, Artificial Sequence
  Description of Artificial Sequence: Synthetic polypeptide
EVQLVESGGGLVQPGGSLRLSCAASGYTYSSYVMGWFRQAPGKEREFVAAISRFGSTYYADSVKGRFTISADNSKNTAYLQMNSLKPEDTAVYYCARDSGEHFWDSGYIDHWGQGTLVTVSS

SEQ ID NO: 3360 - protein, 115 aa, Artificial Sequence
  Description of Artificial Sequence: Synthetic polypeptide
EVQLVESGGGLVQPGGSLRLSCAASGDTYGSYWMGWFRQAPGKEREVVAAITSGGSTVYADSVKGRFTISADNSKNTAYLQMNSLKPEDTAVYYCARVDSRFDYWGQGTLVTVSS

SEQ ID NO: 3361 - protein, 117 aa, Artificial Sequence
  Description of Artificial Sequence: Synthetic polypeptide
EVQLVESGGGLVQPGGSLRLSCAASGISINTNVMGWFRQAPGKEREFVAAISTGSVTIYADSVKGRFTISADNSKNTAYLQMNSLKPEDTAVYYCARVDDFGYFDLWGQGTLVTVSS

SEQ ID NO: 3362 - protein, 123 aa, Artificial Sequence
  Description of Artificial Sequence: Synthetic polypeptide
EVQLVESGGGLVQPGGSLRLSCAASGFEFENHWMGWFRQAPGKEREYVAHITAGGLSNYADSVKGRFTISADNSKNTAYLQMNSLKPEDTAVYYCGRHWGIYDSSGFSSFDYWGQGTLVTVSS

SEQ ID NO: 3363 - protein, 115 aa, Artificial Sequence
  Description of Artificial Sequence: Synthetic polypeptide
EVQLVESGGGLVQPGGSLRLSCAASGFTMSSSWMGWFRQAPGKEREFVARITSGGSTGYADSVKGRFTISADNSKNTAYLQMNSLKPEDTAVYYCASVDGYFDYWGQGTLVTVSS

SEQ ID NO: 3364 - protein, 118 aa, Artificial Sequence
  Description of Artificial Sequence: Synthetic polypeptide
EVQLVESGGGLVQPGGSLRLSCAASGNIFRSNMGWFRQAPGKEREFVAGITWNGDTTYYADSVKGRFTISADNSKNTAYLQMNSLKPEDTAVYYCARALGVTYQFDYWGQGTLVTVSS

SEQ ID NO: 3365 - protein, 118 aa, Artificial Sequence
  Description of Artificial Sequence: Synthetic polypeptide
EVQLVESGGGLVQPGGSLRLSCAASGLTFDDHSMGWFRQAPGKEREFVAAVPLSGNTYYADSVKGRFTISADNSKNTAYLQMNSLKPEDTAVYYCASFSGGPADFDYWGQGTLVTVSS

SEQ ID NO: 3366 - protein, 122 aa, Artificial Sequence
  Description of Artificial Sequence: Synthetic polypeptide
EVQLVESGGGLVQPGGSLRLSCAASGRAVSTYAMGWFRQAPGKEREFVAAISGSENVTSYADSVKGRFTISADNSKNTAYLQMNSLKPEDTAVYYCLSVTGDTEDYGVFDTWGQGTLVTVSS

SEQ ID NO: 3367 - protein, 123 aa, Artificial Sequence
  Description of Artificial Sequence: Synthetic polypeptide
EVQLVESGGGLVQPGGSLRLSCAASGISGSVFSRTPMGWFRQAPGKEREWVSSIYSDGSNTYYADSVKGRFTISADNSKNTAYLQMNSLKPEDTAVYYCAHWSWELGDWFDPWGQGTLVTVSS

SEQ ID NO: 3368 - protein, 123 aa, Artificial Sequence
  Description of Artificial Sequence: Synthetic polypeptide
EVQLVESGGGLVQPGGSLRLSCAASGDTYGSYWMGWFRQAPGKEREFVATISQSGAATAYADSVKGRFTISADNSKNTAYLQMNSLKPEDTAVYYCAGLLRYSGTYYDAFDVWGQGTLVTVSS

SEQ ID NO: 3369 - protein, 117 aa, Artificial Sequence
  Description of Artificial Sequence: Synthetic polypeptide
EVQLVESGGGLVQPGGSLRLSCAASGDTYGSYWMGWFRQAPGKEREFVAAINWSGGSTNYADSVKGRFTITADNNKNTAYLQMNSLKPEDTAVYYCAGLGWNYMDYWGQGTLVTVSS

SEQ ID NO: 3370 - protein, 118 aa, Artificial Sequence
  Description of Artificial Sequence: Synthetic polypeptide
EVQLVESGGGLVQPGGSLRLSCAASGSTFSGNWMGWFRQAPGKEREFVAVISWTGGSTYYADSVKGRFTISADNSKNTAYLQMNSLKPEDTAVYYCATHNSLSGFDYWGQGTLVTVSS

SEQ ID NO: 3371 - protein, 113 aa, Artificial Sequence
  Description of Artificial Sequence: Synthetic polypeptide
EVQLVESGGGLVQPGGSLRLSCAASGQTFNMGWFRQAPGKEREFVAAIGSGGSTSYADSVKGRFTISADNSKNTAYLQMNSLKPEDTAVYYCWRLGNDYFDYWGQGTLVTVSS

SEQ ID NO: 3372 - protein, 116 aa, Artificial Sequence
  Description of Artificial Sequence: Synthetic polypeptide
EVQLVESGGGLVQPGGSLRLSCAASGIPSIHAMGWFRQAPGKERELVAAINWSHGVTYYADSVKGRFTISADNSKNTAYLQMNSLKPEDTAVYYCGGGYGYHFDYWGQGTLVTVSS

SEQ ID NO: 3373 - protein, 126 aa, Artificial Sequence
  Description of Artificial Sequence: Synthetic polypeptide
EVQLVESGGGLVQPGGSLRLSCAASGLPFSTLHMGWFRQAPGKEREFVASLSIFGATGYADSVKGRFTISADNSKNTAYLQMNSLKPEDTAVYYCWMYYYDSSGYYGNYYYGMDVWGQGTLVTVSS

SEQ ID NO: 3374 - protein, 126 aa, Artificial Sequence
  Description of Artificial Sequence: Synthetic polypeptide
EVQLVESGGGLVQPGGSLRLSCAASGLTFSLFAMGWFRQAPGKERELVAAISSGGSTDYADSVKGRFTISADNSKNTAYLQMNSLKPEDTAVYYCARGNTKYYYDSSGYSSAFDYWGQGTLVTVSS

SEQ ID NO: 3375 - protein, 119 aa, Artificial Sequence
  Description of Artificial Sequence: Synthetic polypeptide
EVQLVESGGGLVQPGGSLRLSCAASGSFSNYAMGWFRQAPGKEREFVAAISSSGALTSYADSVKGRFTISADNSKNTAYLQMNSLKPEDTAVYYCWIVGPGPLDGMDVWGQGTLVTVSS

SEQ ID NO: 3376 - protein, 120 aa, Artificial Sequence
  Description of Artificial Sequence: Synthetic polypeptide
EVQLVESGGGLVQPGGSLRLSCAASGFTLSDRAMGWFRQAPGKEREYVAHITAGGLSNYADSVKGRFTISADNSKNTAYLQMNSLKPEDTAVYYCVHLASQTGAGYFDLWGQGTLVTVSS

SEQ ID NO: 3377 - protein, 117 aa, Artificial Sequence
  Description of Artificial Sequence: Synthetic polypeptide
EVQLVESGGGLVQPGGSLRLSCAASGGTFSSVGMGWFRQAPGKEREFVAGISRSGGTYYADSVKGRFTISADNSKNTAYLQMNSLKPEDTAVYYCARYDFWSGYPYWGQGTLVTVSS

SEQ ID NO: 3378 - protein, 123 aa, Artificial Sequence
  Description of Artificial Sequence: Synthetic polypeptide
EVQLVESGGGLVQPGGSLRLSCAASGFNLDDYADMGWFRQAPGKEREFVAAIGWGGGSTRYADSVKGRFTISADNSKNTAYLQMNSLKPEDTAVYYCAREILWFGEFGEPNVWGQGTLVTVSS

SEQ ID NO: 3379 - protein, 123 aa, Artificial Sequence
  Description of Artificial Sequence: Synthetic polypeptide
EVQLVESGGGLVQPGGSLRLSCAASGITFSNDAMGWFRQAPGKEREFVAIITSSDTNDTTNYADSVKGRFTISADNSKNTAYLQMNSLKPEDTAVYYCARLHYYDSSGYFDYWGQGTLVTVSS

SEQ ID NO: 3380 - protein, 120 aa, Artificial Sequence
  Description of Artificial Sequence: Synthetic polypeptide
EVQLVESGGGLVQPGGSLRLSCAASGSTLSINAMGWFRQAPGKEREFVAAIDWSGGSTAYADSVKGRFTISADNSKNTAYLQMNSLKPEDTAVYYCARDSSATRTGPDYWGQGTLVTVSS

SEQ ID NO: 3381 - protein, 116 aa, Artificial Sequence
  Description of Artificial Sequence: Synthetic polypeptide
EVQLVESGGGLVQPGGSLRLSCAASGHTFSGYAMGWFRQAPGKEREFVAVITREGSTYYADSVKGRFTISADNSKNTAYLQMNSLKPEDTAVYYCARLGGEGFDYWGQGTLVTVSS

SEQ ID NO: 3382 - protein, 119 aa, Artificial Sequence
  Description of Artificial Sequence: Synthetic polypeptide
EVQLVESGGGLVQPGGSLRLSCAASGFAFGDSWMGWFRQAPGKERELVAAITSGGSTDYADSVKGRFTISADNSKNTAYLQMNSLKPEDTAVYYCARGLLWFGELFGYWGQGTLVTVSS

SEQ ID NO: 3383 - protein, 121 aa, Artificial Sequence
  Description of Artificial Sequence: Synthetic polypeptide
EVQLVESGGGLVQPGGSLRLSCAASGGTFSTYWMGWFRQAPGKEREFVAAISRSGGNTYYADSVKGRFTISADNSKNTAYLQMNSLKPEDTAVYYCVRHSGTDGDSSFDYWGQGTLVTVSS

SEQ ID NO: 3384 - protein, 115 aa, Artificial Sequence
  Description of Artificial Sequence: Synthetic polypeptide
EVQLVESGGGLVQPGGSLRLSCAASGLAFDFDGMGWFRQAPGKEREGVAAINSGGSTYYADSVKGRFTISADNSKNTAYLQMNSLKPEDTAVYYCARFFRAHDYWGQGTLVTVSS

SEQ ID NO: 3385 - protein, 115 aa, Artificial Sequence
  Description of Artificial Sequence: Synthetic polypeptide
EVQLVESGGGLVQPGGSLRLSCAASGFTFDRSWMGWFRQAPGKEREFVAAVTEGGTTSYADSVKGRFTISADNSKNTAYLQMNSLKPEDTAVYYCARADYDFDYWGQGTLVTVSS

SEQ ID NO: 3386 - protein, 119 aa, Artificial Sequence
  Description of Artificial Sequence: Synthetic polypeptide
EVQLVESGGGLVQPGGSLRLSCAASGRTYDAMGWFRQAPGKEREFVASVTSGGYTHYADSVKGRFTISADNSKNTAYLQMNSLKPEDTAVYYCAKFGRKIVGATELDYWGQGTLVTVSS

SEQ ID NO: 3387 - protein, 124 aa, Artificial Sequence
  Description of Artificial Sequence: Synthetic polypeptide
EVQLVESGGGLVQPGGSLRLSCAASGSISSIDYMGWFRQAPGKEREGVSWISSSDGSTYYADSVKGRFTISADNSKNTAYLQMNSLKPEDTAVYYCARSPSFSQIYYYYYMDVWGQGTLVTVSS

SEQ ID NO: 3388 - protein, 124 aa, Artificial Sequence; identical to SEQ ID NO: 3043
  Description of Artificial Sequence: Synthetic polypeptide

SEQ ID NO: 3389 - protein, 125 aa, Artificial Sequence; identical to SEQ ID NO: 3048
  Description of Artificial Sequence: Synthetic polypeptide

SEQ ID NO: 3390 - protein, 119 aa, Artificial Sequence
  Description of Artificial Sequence: Synthetic polypeptide
EVQLVESGGGLVQPGGSLRLSCAASGSSLDAYGMGWFRQAPGKEREFVAAISWGGGSIYYADSVKGRFTISADNSKNTAYLQMNSLKPEDTAVYYCARLSQGMVALDYWGQGTLVTVSS

SEQ ID NO: 3391 - protein, 122 aa, Artificial Sequence
  Description of Artificial Sequence: Synthetic polypeptide
EVQLVESGGGLVQPGGSLRLSCAASGSIASIHAMGWFRQAPGKEREFVAAITWSGAITSYADSVKGRFTISADNSKNTAYLQMNSLKPEDTAVYYCAKDGGYGELHYGMEVWGQGTLVTVSS

SEQ ID NO: 3392 - protein, 113 aa, Artificial Sequence
  Description of Artificial Sequence: Synthetic polypeptide
EVQLVESGGGLVQPGGSLRLSCAASGFTPDDYAMGWFRQAPGKEREFVAAINSGGSYTYYADSVKGRFTISADNSKNTAYLQMNSLKPEDTAVYYCARDRGPWGQGTLVTVSS

SEQ ID NO: 3393 - protein, 115 aa, Artificial Sequence
  Description of Artificial Sequence: Synthetic polypeptide
EVQLVESGGGLVQPGGSLRLSCAASGGTFSVFAMGWFRQAPGKEREFVSAINWSGGSLLYADSVKGRFTISADNSKNTAYLQMNSLKPEDTAVYYCALFGDFDYWGQGTLVTVSS

SEQ ID NO: 3394 - protein, 118 aa, Artificial Sequence
  Description of Artificial Sequence: Synthetic polypeptide
EVQLVESGGGLVQPGGSLRLSCAASGPISGINRMGWFRQAPGKEREFVAVITSNGRPSYADSVKGRFTISADNSKNTAYLQMNSLKPEDTAVYYCVRLSSGYFDFDYWGQGTLVTVSS

SEQ ID NO: 3395 - protein, 117 aa, Artificial Sequence
  Description of Artificial Sequence: Synthetic polypeptide
EVQLVESGGGLVQPGGSLRLSCAASGTSIMVGAMGWFRQAPGKEREFVAIIRGDGRTSYADSVKGRFTISADNSKNTAYLQMNSLKPEDTAVYYCARFAGWDAFDIWGQGTLVTVSS

SEQ ID NO: 3396 - protein, 120 aa, Artificial Sequence
  Description of Artificial Sequence: Synthetic polypeptide
EVQLVESGGGLVQPGGSLRLSCAASGRTFSTHWMGWFRQAPGKEREFVAVINWSGGSIYYADSVKGRFTISADNSKNTAYLQMNSLKPEDTAVYYCARLSSDGYNYFDFWGQGTLVTVSS

SEQ ID NO: 3397 - protein, 115 aa, Artificial Sequence
  Description of Artificial Sequence: Synthetic polypeptide
EVQLVESGGGLVQPGGSLRLSCAASGTIFASAMGWFRQAPGKEHQFVAVVNWNGSSTVYADNVKGRFTIIADNSKNTAYLQMNSLKPEDTAVYYCTTVDQYFNYWGQGTLVTVSS

SEQ ID NO: 3398 - protein, 119 aa, Artificial Sequence
  Description of Artificial Sequence: Synthetic polypeptide
EVQLVESGGGLVQPGGSLRLSCAASGFPFSIWPMGWFRQAPGKEREFVAAVRWSSTYYADSVKGRFTISADNSKNTAYLQMNSLKPEDTAVYYCATGECDGGSCSLAYWGQGTLVTVSS

SEQ ID NO: 3399 - protein, 120 aa, Artificial Sequence
  Description of Artificial Sequence: Synthetic polypeptide
EVQLVESGGGLVQPGGSLRLSCAASGRTFGNYAMGWFRQAPGKEREFVASISSSGVSKHYADSVKGRFTISADNSKNTAYLQMNSLKPEDTAVYYCVRFGSSWARDLDQWGQGTLVTVSS

SEQ ID NO: 3400 - protein, 117 aa, Artificial Sequence
  Description of Artificial Sequence: Synthetic polypeptide
EVQLVESGGGLVQPGGSLRLSCAASGFLFDSYASMGWFRQAPGKEREFVATIWRRGNTYYANYADSVKGRFTISADNSKNTAYLQMNSLKPEDTAVYYCTETGTAAWGQGTLVTVSS

SEQ ID NO: 3401 - protein, 122 aa, Artificial Sequence
  Description of Artificial Sequence: Synthetic polypeptide
EVQLVESGGGLVQPGGSLRLSCAASGLPFSTKSMGWFRQAPGKEREFVAAISMSGLTSYADSVKGRFTISADNSKNTAYLQMNSLKPEDTAVYYCLKVLGGDYEADNWFDYWGQGTLVTVSS

SEQ ID NO: 3402 - protein, 123 aa, Artificial Sequence
  Description of Artificial Sequence: Synthetic polypeptide
EVQLVESGGGLVQPGGSLRLSCAASGNIFRIETMGWFRQAPGKEREFVAGIIRSGGETLYADSVKGRFTISADNSKNTAYLQMNSLKPEDTAVYYCARSLYYDRSGSYYFDYWGQGTLVTVSS

SEQ ID NO: 3403 - protein, 127 aa, Artificial Sequence
  Description of Artificial Sequence: Synthetic polypeptide
EVQLVESGGGLVQPGGSLRLSCAASGIPSSIRAMGWFRQAPGKEREFVAVIRWTGGSTYYADSVKGRFTISADNSKNTAYLQMNSLKPEDTAVYYCARDIGYYDSSGYYNDGGFDYWGQGTLVTVSS

SEQ ID NO: 3404 - protein, 125 aa, Artificial Sequence
  Description of Artificial Sequence: Synthetic polypeptide
EVQLVESGGGLVQPGGSLRLSCAASGFTLSGNWMGWFRQAPGKEREFVAIITSGGRTNYADSVKGRFTISADNSKNTAYLQMNSLKPEDTAVYYCAGHATFGGSSSSYYYGMDVWGQGTLVTVSS

SEQ ID NO: 3405 - protein, 117 aa, Artificial Sequence
  Description of Artificial Sequence: Synthetic polypeptide
EVQLVESGGGLVQPGGSLRLSCAASGFTFSSLAMGWFRQAPGKEREFVAAITWSGDITNYADSVKGRFTITADNSKNTAYLQMNSLKPEDTAVYYCLRLSSSGFDHWGQGTLVTVSS

SEQ ID NO: 3406 - protein, 124 aa, Artificial Sequence
  Description of Artificial Sequence: Synthetic polypeptide
EVQLVESGGGLVQPGGSLRLSCAASGTFGHYAMGWFRQAPGKEREFVAAINWSSRSTVYADSVKGRFTITADNSKNTAYLQMNSLKPEDTAVYYCAKSDGLMGELRSASAFDIWGQGTLVTVSS

SEQ ID NO: 3407 - protein, 116 aa, Artificial Sequence
  Description of Artificial Sequence: Synthetic polypeptide
EVQLVESGGGLVQPGGSLRLSCAASGIPFRSRTMGWFRQAPGKEREFVAGISRSGASTAYADSVKGRFTISADNSKNTAYLQMNSLKPEDTAVYYCTHANDYGDYWGQGTLVTVSS

SEQ ID NO: 3408 - protein, 119 aa, Artificial Sequence
  Description of Artificial Sequence: Synthetic polypeptide
EVQLVESGGGLVQPGGSLRLSCAASGGTFSTSWMGWFRQAPGKEREYVAHITAGGLSNYADSVKGRFTISADNSKNTAYLQMNSLKPEDTAVYYCARLLVREDWYFDLWGQGTLVTVSS

SEQ ID NO: 3409 - protein, 119 aa, Artificial Sequence
  Description of Artificial Sequence: Synthetic polypeptide
EVQLVESGGGLVQPGGSLRLSCAASGGTFSLFAMGWFRQAPGKEREFVAAISWTGDSTYYKYYADSVKGRFTISADNSKNTAYLQMNSLKPEDTAVYYCAYNNSSGEYWGQGTLVTVSS

SEQ ID NO: 3410 - protein, 118 aa, Artificial Sequence
  Description of Artificial Sequence: Synthetic polypeptide
EVQLVESGGGLVQPGGSLRLSCAASGSSFSAYAMGWFRQAPGKEREFVSAIDSEGTTTYADSVKGRFTISADNSKNTAYLQMNSLKPEDTAVYYCAGDYNFWSGFDHWGQGTLVTVSS

SEQ ID NO: 3411 - protein, 118 aa, Artificial Sequence
  Description of Artificial Sequence: Synthetic polypeptide
EVQLVESGGGLVQPGGSLRLSCAASGRTSSPIAMGWFRQAPGKEREPVAVRWSDDYTYYADSVKGRFTISADNSKNTAYLQMNSLKPEDTAVYYCAKKLGGYYAFDIWGQGTLVTVSS

SEQ ID NO: 3412 - protein, 115 aa, Artificial Sequence
  Description of Artificial Sequence: Synthetic polypeptide
EVQLVESGGGLVQPGGSLRLSCAASGLTFNQYTMGWFRQAPGKEREFVASITDGGSTYYADSVKGRFTISADNSKNTAYLQMNSLKPEDTAVYYCARDSRYMDVWGQGTLVTVSS

SEQ ID NO: 3413 - protein, 115 aa, Artificial Sequence
  Description of Artificial Sequence: Synthetic polypeptide
EVQLVESGGGLVQPGGSLRLSCAASGPTFSSMGWFRQAPGKEREFVAAISWDGGATAYADSVKGRFTISADNSKNTAYLQMNSLKPEDTAVYYCAIEIVVGGIYWGQGTLVTVSS

SEQ ID NO: 3414 - protein, 116 aa, Artificial Sequence
  Description of Artificial Sequence: Synthetic polypeptide
EVQLVESGGGLVQPGGSLRLSCAASGIPSTLRAMGWFRQAPGKEREFVAATSWSGGSKYYADSVKGRFTISADNSKNTAYLQMNSLKPEDTAVYYCATDLYYMDVWGQGTLVTVSS

SEQ ID NO: 3415 - protein, 119 aa, Artificial Sequence
  Description of Artificial Sequence: Synthetic polypeptide
EVQLVESGGGLVQPGGSLRLSCAASGGVGFSVTNMGWFRQAPGKEREFVAVISSSSSTNYADSVKGRFTISADNSKNTAYLQMNSLKPEDTAVYYCTTFNWNDEGFDYWGQGTLVTVSS

SEQ ID NO: 3416 - protein, 125 aa, Artificial Sequence
  Description of Artificial Sequence: Synthetic polypeptide
EVQLVESGGGLVQPGGSLRLSCAASGGTFGSYGMGWFRQAPGKEREFVAAIRWSGGITYYADSVKGRFTISADNSKNTAYLQMNSLKPEDTAVYYCARERYWNPLPYYYYGMDVWGQGTLVTVSS

SEQ ID NO: 3417 - protein, 128 aa, Artificial Sequence
  Description of Artificial Sequence: Synthetic polypeptide
EVQLVESGGGLVQPGGSLRLSCAASGGTFSTYAMGWFRQVPGKEREFVASIDWSGLTSYADSVKGRFTISADNSKNTAYLQMNSLKPEDTAVYYCARGPFYMYCSGTKCYSTNWFDPWGQGTLVTVSS

SEQ ID NO: 3418 - protein, 122 aa, Artificial Sequence
  Description of Artificial Sequence: Synthetic polypeptide
EVQLVESGGGLVQPGGSLRLSCAASGPIYAVNRMGWFRQAPGKEREFVAGIWRSGGHRDYADSVKGRFTISADNSKNTAYLQMNSLKPEDTAVYYCARGEIDILTGYWYDYWGQGTLVTVSS

SEQ ID NO: 3419 - protein, 126 aa, Artificial Sequence
  Description of Artificial Sequence: Synthetic polypeptide
EVQLVESGGGLVQPGGSLRLSCAASGFTFSNYWMGWFRQAPGKEREFVGGISRSGVSTSYADSVKGRFTISADNSKNTAYLQMNSLKPEDTAVYYCTTLLYYYDSSGYSFDAFDIWGQGTLVTVSS

SEQ ID NO: 3420 - protein, 125 aa, Artificial Sequence
  Description of Artificial Sequence: Synthetic polypeptide
EVQLVESGGGLVQPGGSLRLSCAASGGTFSAYHMGWFRQAPGKERELVTIIDNGGPTSYADSVKGRFTISADNSKNTAYLQMNSLKPEDTAVYYCTALLYYFDNSGYNFDPFDIWGQGTLVTGSS

SEQ ID NO: 3421 - protein, 126 aa, Artificial Sequence; identical to SEQ ID NO: 3049
  Description of Artificial Sequence: Synthetic polypeptide

SEQ ID NO: 3422 - protein, 122 aa, Artificial Sequence; identical to SEQ ID NO: 3050
  Description of Artificial Sequence: Synthetic polypeptide

SEQ ID NO: 3423 - protein, 122 aa, Artificial Sequence; identical to SEQ ID NO: 14
  Description of Artificial Sequence: Synthetic polypeptide

SEQ ID NO: 3424 - protein, 129 aa, Artificial Sequence; identical to SEQ ID NO: 8
  Description of Artificial Sequence: Synthetic polypeptide

SEQ ID NO: 3425 - protein, 122 aa, Artificial Sequence
  Description of Artificial Sequence: Synthetic polypeptide
EVQLLESGGGLVQPGGSLRLSCAASGFTFSDFAMAWVRQAPGKGLEWVSAISGSGDITYYADSVKGRFTISRDNSKNTLYLQMNSLRAEDTAVYYCAREADCLPSPWYLDLWGQGTLVTVSS

SEQ ID NO: 3426 - protein, 122 aa, Artificial Sequence; identical to SEQ ID NO: 14
  Description of Artificial Sequence: Synthetic polypeptide

SEQ ID NO: 3427 - protein, 117 aa, Artificial Sequence; identical to SEQ ID NO: 2
  Description of Artificial Sequence: Synthetic polypeptide

SEQ ID NO: 3428 - protein, 122 aa, Artificial Sequence; identical to SEQ ID NO: 3055
  Description of Artificial Sequence: Synthetic polypeptide

SEQ ID NO: 3429 - protein, 117 aa, Artificial Sequence; identical to SEQ ID NO: 3056
  Description of Artificial Sequence: Synthetic polypeptide

SEQ ID NO: 3430 - protein, 117 aa, Artificial Sequence; identical to SEQ ID NO: 3057
  Description of Artificial Sequence: Synthetic polypeptide

SEQ ID NO: 3431 - protein, 117 aa, Artificial Sequence; identical to SEQ ID NO: 3058
  Description of Artificial Sequence: Synthetic polypeptide

SEQ ID NO: 3432 - protein, 117 aa, Artificial Sequence; identical to SEQ ID NO: 3059
  Description of Artificial Sequence: Synthetic polypeptide

SEQ ID NO: 3433 - protein, 122 aa, Artificial Sequence; identical to SEQ ID NO: 14
  Description of Artificial Sequence: Synthetic polypeptide

SEQ ID NO: 3434 - protein, 122 aa, Artificial Sequence; identical to SEQ ID NO: 14
  Description of Artificial Sequence: Synthetic polypeptide

SEQ ID NO: 3435 - protein, 116 aa, Artificial Sequence; identical to SEQ ID NO: 3062
  Description of Artificial Sequence: Synthetic polypeptide

SEQ ID NO: 3436 - protein, 107 aa, Artificial Sequence
  Description of Artificial Sequence: Synthetic polypeptide
DIQMTQSPSSLSASVGDRVTITCRASQSIHRFLNWYQQKPGKAPKLLIYAASNLHSGVPSRFSGSGSGTDFTLTISSLQPEDFATYYCQQSYGLPPTFGQGTKVEIK

SEQ ID NO: 3437 - protein, 108 aa, Artificial Sequence
  Description of Artificial Sequence: Synthetic polypeptide
DIQMTQSPSSLSASVGDRVTITCRASQSIHISLNWYQQKPGKAPKLLIYLASPLASGVPSRFSGSGSGTDFTLTISSLQPEDFATYYCQQSYSAPPYTFGQGTKVEIK

SEQ ID NO: 3438 - protein, 108 aa, Artificial Sequence; identical to SEQ ID NO: 13
  Description of Artificial Sequence: Synthetic polypeptide

SEQ ID NO: 3439 - protein, 106 aa, Artificial Sequence; identical to SEQ ID NO: 7
  Description of Artificial Sequence: Synthetic polypeptide

SEQ ID NO: 3440 - protein, 108 aa, Artificial Sequence
  Description of Artificial Sequence: Synthetic polypeptide
DIQMTQSPSSLSASVGDRVTITCRASQNIHTYLNWYQQKPGKAPKLLIYAASTFAKGVPSRFSGSGSGTDFTLTISSLQPEDFATYYCQQSYSAPPYTFGQGTKVEIK

SEQ ID NO: 3441 - protein, 108 aa, Artificial Sequence; identical to SEQ ID NO: 1
  Description of Artificial Sequence: Synthetic polypeptide

SEQ ID NO: 3442 - protein, 107 aa, Artificial Sequence
  Description of Artificial Sequence: Synthetic polypeptide
DIQMTQSPSSLSASVGDRVTITCRASQSIGNYLNWYQQKPGKAPKLLIYGVSSLQSGVPSRFSGSGSGTDFTLTISSLQPEDFATYYCQQSHSAPLTFGQGTKVEIK

SEQ ID NO: 3443 - protein, 108 aa, Artificial Sequence; identical to SEQ ID NO: 1
  Description of Artificial Sequence: Synthetic polypeptide

SEQ ID NO: 3444 - protein, 108 aa, Artificial Sequence
  Description of Artificial Sequence: Synthetic polypeptide
DIQMTQSPSSLSASVGDRVTITCRASQSIDNYLNWYQQKPGKAPKLLIYGVSALQSGVPSRFSGSGSGTDFTLTISSLQPEDFATYYCQQSHSAPPYFFGQGTKVEIK

SEQ ID NO: 3445 - protein, 108 aa, Artificial Sequence
  Description of Artificial Sequence: Synthetic polypeptide
DIQMTQSPSSLSASVGDRVTITCRASQSIDTYLNWYQQKPGKAPKLLIYGASALESGVPSRFSGSGSGTDFTLTISSLQPEDFATYYCQQSHSAPPYFFGQGTKVEIK

SEQ ID NO: 3446 - protein, 108 aa, Artificial Sequence; identical to SEQ ID NO: 1
  Description of Artificial Sequence: Synthetic polypeptide

SEQ ID NO: 3447 - protein, 108 aa, Artificial Sequence
  Description of Artificial Sequence: Synthetic polypeptide
DIQMTQSPSSLSASVGDRVTITCRASQSIDTYLNWYQQKPGKAPKLLIYGVSALQSGVPSRFSGSGSGTDFTLTISSLQPEDFATYYCQQSYSAPPYFFGQGTKVEIK

SEQ ID NO: 3448 - protein, 108 aa, Artificial Sequence; identical to SEQ ID NO: 1
  Description of Artificial Sequence: Synthetic polypeptide

SEQ ID NO: 3449 - protein, 107 aa, Artificial Sequence
  Description of Artificial Sequence: Synthetic polypeptide
DIQMTQSPSSLSASVGDRVTITCRASQSIDNYLNWYQQKPGKAPKLLIYGVSALQSGVPSRFSGSGSGTDFTLTISSLQPEDFATYYCQQSHSAPLTFGQGTKVEIK

SEQ ID NO: 3450 - protein, 107 aa, Artificial Sequence
  Description of Artificial Sequence: Synthetic polypeptide
DIQMTQSPSSLSASVGDRVTITCRASQRIGTYLNWYQQKPGKAPKLLIYAASNLEGGVPSRFSGSGSGTDFTLTISSLQPEDFATYYCQQNYSTTWTFGQGTKVEIK

SEQ ID NO: 3451 - protein, 121 aa, Artificial Sequence
  Description of Artificial Sequence: Synthetic polypeptide
EVQLLESGGGLVQPGGSLRLSCAASGFTFSSYAMSWVRQAPGKGLEWVSVISGSGGSTYYADSVKGRFTISRDNSKNTLYLQMNSLRAEDTAVYYCAREGYRDYLWYFDLWGQGTLVTVSS

SEQ ID NO: 3452 - protein, 123 aa, Artificial Sequence
  Description of Artificial Sequence: Synthetic polypeptide
EVQLLESGGGLVQPGGSLRLSCAASGFTFSNYAMSWVRQAPGKGLEWVSAISGSAGSTYYADSVKGRFTISRDNSKNTLYLQMNSLRAEDTAVYYCARVRQGLRRTWYYFDYWGQGTLVTVSS

SEQ ID NO: 3453 - protein, 123 aa, Artificial Sequence
  Description of Artificial Sequence: Synthetic polypeptide
EVQLLESGGGLVQPGGSLRLSCAASGFTFSSYAMYWVRQAPGKGLEWVSAISGSAGSTYYADSVKGRFTISRDNSKNTLYLQMNSLRAEDTAVYYCARDTNDFWSGYSIFDPWGQGTLVTVSS

SEQ ID NO: 3454 - protein, 121 aa, Artificial Sequence
  Description of Artificial Sequence: Synthetic polypeptide
EVQLLESGGGLVQPGGSLRLSCAASGFTFSSYTMSWVRQAPGKGLEWVSVISGSGGSTYYADSVKGRFTISRDNSKNTLYLQMNSLRAEDTAVYYCAREGYRDYLWYFDLWGQGTLVTVSS

SEQ ID NO: 3455 - protein, 119 aa, Artificial Sequence
  Description of Artificial Sequence: Synthetic polypeptide
EVQLLESGGGLVQPGGSLRLSCAASGFTFSSYDMSWVRQAPGKGLEWVSVISGSGGSTYYADSVKGRFTISRDNSKNTLYLQMNSLRAEDTAVYYCAKGPLVGWYFDLWGQGTLVTVSS

SEQ ID NO: 3456 - protein, 110 aa, Artificial Sequence
  Description of Artificial Sequence: Synthetic polypeptide
DIQMTQSPSSLSASVGDRVTITCTGTSSDVGSYDLVSWYQQKPGKAPKLLIYEGNKRPSGVPSRFSGSGSGTDFTLTISSLQPEDFATYYCCSYAGSSVVFGQGTKVEIK

SEQ ID NO: 3457 - protein, 110 aa, Artificial Sequence
  Description of Artificial Sequence: Synthetic polypeptide
DIQMTQSPSSLSASVGDRVTITCTGTSSDVGSSNLVSWYQQKPGKAPKLLIYEGSKRPSGVPSRFSGSGSGTDFTLTISSLQPEDFATYYCCSYAGSLYVFGQGTKVEIK

SEQ ID NO: 3458 - protein, 111 aa, Artificial Sequence
  Description of Artificial Sequence: Synthetic polypeptide
DIQMTQSPSSLSASVGDRVTITCTGTSSDIGSYNLVSWYQQKPGKAPKLLIYEGTKRPSGVPSRFSGSGSGTDFTLTISSLQPEDFATYYCCSYAGSRTYVFGQGTKVEIK

SEQ ID NO: 3459 - protein, 112 aa, Artificial Sequence
  Description of Artificial Sequence: Synthetic polypeptide
DIQMTQSPSSLSASVGDRVTITCTGTSTDVGSYNLVSWYQQKPGKAPKLLIYEGTKRPSGVPSRFSGSGSGTDFTLTISSLQPEDFATYYCCSYAGSYTSVVFGQGTKVEIK

SEQ ID NO: 3460 - protein, 112 aa, Artificial Sequence
  Description of Artificial Sequence: Synthetic polypeptide
DIQMTQSPSSLSASVGDRVTITCTGTSSNVGSYNLVSWYQQKPGKAPKLLIYEGTKRPSGVPSRFSGSGSGTDFTLTISSLQPEDFATYYCCSYAGSSSFVVFGQGTKVEIK

SEQ ID NO: 3461 - protein, 126 aa, Artificial Sequence; identical to SEQ ID NO: 3071
  Description of Artificial Sequence: Synthetic polypeptide

SEQ ID NO: 3462 - protein, 121 aa, Artificial Sequence; identical to SEQ ID NO: 3072
  Description of Artificial Sequence: Synthetic polypeptide

SEQ ID NO: 3463 - protein, 123 aa, Artificial Sequence; identical to SEQ ID NO: 3073
  Description of Artificial Sequence: Synthetic polypeptide

SEQ ID NO: 3464 - protein, 122 aa, Artificial Sequence; identical to SEQ ID NO: 3074
  Description of Artificial Sequence: Synthetic polypeptide

SEQ ID NO: 3465 - protein, 121 aa, Artificial Sequence; identical to SEQ ID NO: 3075
  Description of Artificial Sequence: Synthetic polypeptide

SEQ ID NO: 3466 - protein, 122 aa, Artificial Sequence; identical to SEQ ID NO: 3076
  Description of Artificial Sequence: Synthetic polypeptide

SEQ ID NO: 3467 - protein, 126 aa, Artificial Sequence; identical to SEQ ID NO: 3077
  Description of Artificial Sequence: Synthetic polypeptide

SEQ ID NO: 3468 - protein, 121 aa, Artificial Sequence; identical to SEQ ID NO: 3078
  Description of Artificial Sequence: Synthetic polypeptide

SEQ ID NO: 3469 - protein, 121 aa, Artificial Sequence; identical to SEQ ID NO: 3079
  Description of Artificial Sequence: Synthetic polypeptide

SEQ ID NO: 3470 - protein, 126 aa, Artificial Sequence; identical to SEQ ID NO: 3071
  Description of Artificial Sequence: Synthetic polypeptide

SEQ ID NO: 3471 - protein, 121 aa, Artificial Sequence; identical to SEQ ID NO: 3081
  Description of Artificial Sequence: Synthetic polypeptide

SEQ ID NO: 3472 - protein, 123 aa, Artificial Sequence; identical to SEQ ID NO: 3082
  Description of Artificial Sequence: Synthetic polypeptide

SEQ ID NO: 3473 - protein, 126 aa, Artificial Sequence; identical to SEQ ID NO: 3071
  Description of Artificial Sequence: Synthetic polypeptide

SEQ ID NO: 3474 - protein, 126 aa, Artificial Sequence; identical to SEQ ID NO: 3084
  Description of Artificial Sequence: Synthetic polypeptide

SEQ ID NO: 3475 - protein, 121 aa, Artificial Sequence; identical to SEQ ID NO: 3085
  Description of Artificial Sequence: Synthetic polypeptide

SEQ ID NO: 3476 - protein, 107 aa, Artificial Sequence
  Description of Artificial Sequence: Synthetic polypeptide
DIQMTQSPSSLSASVGDRVTITCRASQSIRKYLNWYQQKPGKAPKLLIYASSTLQRGVPSRFSGSGSGTDFTLTISSLQPEDFATYYCQQSLSTPFTFGQGTKVEIK

SEQ ID NO: 3477 - protein, 107 aa, Artificial Sequence
  Description of Artificial Sequence: Synthetic polypeptide
DIQMTQSPSSLSASVGDRVTITCRASQNIKTYLNWYQQKPGKAPKLLIYAASKLQSGVPSRFSGSGSGTDFTLTISSLQPEDFATYYCQQSYSTSPTFGQGTKVEIK

SEQ ID NO: 3478 - protein, 103 aa, Artificial Sequence
  Description of Artificial Sequence: Synthetic polypeptide
DIQMTQSPSSLSASVGDRVTITCRASQTIYSYLNWYQQKPGKAPKLLIYATSTLQGGVPSRFSGSGSGTDFTLTISSLQPEDFATYYCQHRGTFGQGTKVEIK

SEQ ID NO: 3479 - protein, 107 aa, Artificial Sequence
  Description of Artificial Sequence: Synthetic polypeptide
DIQMTQSPSSLSASVGDRVTITCRASRSIRRYLNWYQQKPGKAPKLLIYASSSLQAGVPSRFSGSGSGTDFTLTISSLQPEDFATYYCQQSYSTLLTFGQGTKVEIK

SEQ ID NO: 3480 - protein, 107 aa, Artificial Sequence
  Description of Artificial Sequence: Synthetic polypeptide
DIQMTQSPSSLSASVGDRVTITCRASQSIGKYLNWYQQKPGKAPKLLIYASSSLQSGVPSRFSGSGSGTDFTLTISSLQPEDFATYYCQQSYSPPFTFGQGTKVEIK

SEQ ID NO: 3481 - protein, 107 aa, Artificial Sequence
  Description of Artificial Sequence: Synthetic polypeptide
DIQMTQSPSSLSASVGDRVTITCRASRSISRYLNWYQQKPGKAPKLLIYAASSLQAGVPSRFSGSGSGTDFTLTISSLQPEDFATYYCQQSYSSLLTFGQGTKVEIK

SEQ ID NO: 3482 - protein, 107 aa, Artificial Sequence
  Description of Artificial Sequence: Synthetic polypeptide
DIQMTQSPSSLSASVGDRVTITCRASQSIGKYLNWYQQKPGKAPKLLIYASSTLQRGVPSRFSGSGSGTDFTLTISSLQPEDFATYYCQQSLSPPFTFGQGTKVEIK

SEQ ID NO: 3483 - protein, 107 aa, Artificial Sequence
  Description of Artificial Sequence: Synthetic polypeptide
DIQMTQSPSSLSASVGDRVTITCRASQSIGRYLNWYQQKPGKAPKLLIYASSSLQSGVPSRFSGSGSGTDFTLTISSLQPEDFATYYCQQSYSLPRTFGQGTKVEIK

SEQ ID NO: 3484 - protein, 107 aa, Artificial Sequence
  Description of Artificial Sequence: Synthetic polypeptide
DIQMTQSPSSLSASVGDRVTITCRASQSIGRYLNWYQQKPGKAPKLLIYAASSLKSGVPSRFSGSGSGTDFTLTISSLQPEDFATYYCQQSYSLPRTFGQGTKVEIK

SEQ ID NO: 3485 - protein, 107 aa, Artificial Sequence
  Description of Artificial Sequence: Synthetic polypeptide
DIQMTQSPSSLSASVGDRVTITCRASQSIGKYLNWYQQKPGKAPKLLIYASSTLQRGVPSRFSGSGSGTDFTLTISSLQPEDFATYYCQQSLSTPFTFGQGTKVEIK

SEQ ID NO: 3486 - protein, 107 aa, Artificial Sequence
  Description of Artificial Sequence: Synthetic polypeptide
DIQMTQSPSSLSASVGDRVTITCRASQSIGRYLNWYQQKPGKAPKLLIYAASSLKSGVPSRFSGSGSGTDFTLTISSLQPEDFATYYCQQSYSLPLTFGQGTKVEIK

SEQ ID NO: 3487 - protein, 107 aa, Artificial Sequence
  Description of Artificial Sequence: Synthetic polypeptide
DIQMTQSPSSLSASVGDRVTITCRTSQSINTYLNWYQQKPGKAPKLLIYGASNVQSGVPSRFSGSGSGTDFTLTISSLQPEDFATYYCQQSYRIPRTFGQGTKVEIK

SEQ ID NO: 3488 - protein, 107 aa, Artificial Sequence
  Description of Artificial Sequence: Synthetic polypeptide
DIQMTQSPSSLSASVGDRVTITCRASQSIGKYLNWYQQKPGKAPKLLIYASSTLQRGVPSRFSGSGSGTDFTLTISSLQPEDFATYYCQQSFSPPFTFGQGTKVEIK

SEQ ID NO: 3489 - protein, 107 aa, Artificial Sequence
  Description of Artificial Sequence: Synthetic polypeptide
DIQMTQSPSSLSASVGDRVTITCRASQSIGKYLNWYQQKPGKAPKLLIYASSTLQRGVPSRFSGSGSGTDFTLTISSLQPEDFATYYCQQSFSTPFTFGQGTKVEIK

SEQ ID NO: 3490 - protein, 107 aa, Artificial Sequence; identical to SEQ ID NO: 3484
  Description of Artificial Sequence: Synthetic polypeptide

SEQ ID NO: 3491 - protein, 123 aa, Artificial Sequence; identical to SEQ ID NO: 3086
  Description of Artificial Sequence: Synthetic polypeptide

SEQ ID NO: 3492 - protein, 120 aa, Artificial Sequence; identical to SEQ ID NO: 3087
  Description of Artificial Sequence: Synthetic polypeptide

SEQ ID NO: 3493 - protein, 117 aa, Artificial Sequence; identical to SEQ ID NO: 3088
  Description of Artificial Sequence: Synthetic polypeptide

SEQ ID NO: 3494 - protein, 119 aa, Artificial Sequence; identical to SEQ ID NO: 3089
  Description of Artificial Sequence: Synthetic polypeptide

SEQ ID NO: 3495 - protein, 124 aa, Artificial Sequence; identical to SEQ ID NO: 3090
  Description of Artificial Sequence: Synthetic polypeptide

SEQ ID NO: 3496 - protein, 118 aa, Artificial Sequence; identical to SEQ ID NO: 3091
  Description of Artificial Sequence: Synthetic polypeptide

SEQ ID NO: 3497 - protein, 120 aa, Artificial Sequence; identical to SEQ ID NO: 3092
  Description of Artificial Sequence: Synthetic polypeptide

SEQ ID NO: 3498 - protein, 117 aa, Artificial Sequence; identical to SEQ ID NO: 3093
  Description of Artificial Sequence: Synthetic polypeptide

SEQ ID NO: 3499 - protein, 123 aa, Artificial Sequence; identical to SEQ ID NO: 3094
  Description of Artificial Sequence: Synthetic polypeptide

SEQ ID NO: 3500 - protein, 123 aa, Artificial Sequence; identical to SEQ ID NO: 3095
  Description of Artificial Sequence: Synthetic polypeptide

SEQ ID NO: 3501 - protein, 126 aa, Artificial Sequence; identical to SEQ ID NO: 3096
  Description of Artificial Sequence: Synthetic polypeptide

SEQ ID NO: 3502 - protein, 121 aa, Artificial Sequence; identical to SEQ ID NO: 3097
  Description of Artificial Sequence: Synthetic polypeptide

SEQ ID NO: 3503 - protein, 125 aa, Artificial Sequence; identical to SEQ ID NO: 3098
  Description of Artificial Sequence: Synthetic polypeptide

SEQ ID NO: 3504 - protein, 130 aa, Artificial Sequence; identical to SEQ ID NO: 3099
  Description of Artificial Sequence: Synthetic polypeptide

SEQ ID NO: 3505 - protein, 107 aa, Artificial Sequence
  Description of Artificial Sequence: Synthetic polypeptide
DIQMTQSPSSLSASVGDRVTITCRASQIIGSYLNWYQQKPGKAPKLLIYTTSNLQSGVPSRFSGSGSGTDFTLTISSLQPEDFATYYCQQSYITPWTFGQGTKVEIK

SEQ ID NO: 3506 - protein, 107 aa, Artificial Sequence
  Description of Artificial Sequence: Synthetic polypeptide
DIQMTQSPSSLSASVGDRVTITCRASQSISRYINWYQQKPGKAPKLLIYEASSLESGVPSRFSGSGSGTDFTLTISSLQPEDFATYYCQQSHITPLTFGQGTKVEIK

SEQ ID NO: 3507 - protein, 107 aa, Artificial Sequence
  Description of Artificial Sequence: Synthetic polypeptide
DIQMTQSPSSLSASVGDRVTITCRASQSIYTYLNWYQQKPGKAPKLLIYSASNLHSGVPSRFSGSGSGTDFTLTISSLQPEDFATYYCQQSDTTPWTFGQGTKVEIK

SEQ ID NO: 3508 - protein, 107 aa, Artificial Sequence
  Description of Artificial Sequence: Synthetic polypeptide
DIQMTQSPSSLSASVGDRVTITCRASQSIATYLNWYQQKPGKAPKLLIYGASSLEGGVPSRFSGSGSGTDFTLTISSLQPEDFATYYCQQTFSSPFTFGQGTKVEIK

SEQ ID NO: 3509 - protein, 107 aa, Artificial Sequence
  Description of Artificial Sequence: Synthetic polypeptide
DIQMTQSPSSLSASVGDRVTITCRASQNINTYLNWYQQKPGKAPKLLIYSASSLQSGVPSRFSGSGSGTDFTLTISSLQPEDFATYYCQQSSLTPWTFGQGTKVEIK

SEQ ID NO: 3510 - protein, 107 aa, Artificial Sequence
  Description of Artificial Sequence: Synthetic polypeptide
DIQMTQSPSSLSASVGDRVTITCRASQGIATYLNWYQQKPGKAPKLLIYYASNLQSGVPSRFSGSGSGTDFTLTISSLQPEDFATYYCQQSYSTRFTFGQGTKVEIK

SEQ ID NO: 3511 - protein, 107 aa, Artificial Sequence
  Description of Artificial Sequence: Synthetic polypeptide
DIQMTQSPSSLSASVGDRVTITCRASERISNYLNWYQQKPGKAPKLLIYTASNLESGVPSRFSGSGSGTDFTLTISSLQPEDFATYYCQQSYTPPRTFGQGTKVEIK

SEQ ID NO: 3512 - protein, 107 aa, Artificial Sequence
  Description of Artificial Sequence: Synthetic polypeptide
DIQMTQSPSSLSASVGDRVTITCRASQSISSSLNWYQQKPGKAPKLLIYAASRLQDGVPSRFSGSGSGTDFTLTISSLQPEDFATYYCQQSYSTPRSFGQGTKVEIK

SEQ ID NO: 3513 - protein, 107 aa, Artificial Sequence
  Description of Artificial Sequence: Synthetic polypeptide
DIQMTQSPSSLSASVGDRVTITCRASQSISSHLNWYQQKPGKAPKLLIYRASTLQSGVPSRFSGSGSGTDFTLTISSLQPEDFATYYCQQTYNTPQTFGQGTKVEIK

SEQ ID NO: 3514 - protein, 107 aa, Artificial Sequence
  Description of Artificial Sequence: Synthetic polypeptide
DIQMTQSPSSLSASVGDRVTITCRASQSISSYLIWYQQKPGKAPKLLIYAASRLHSGVPSRFSGSGSGTDFTLTISSLQPEDFATYYCQQGYNTPRTFGQGTKVEIK

SEQ ID NO: 3515 - protein, 107 aa, Artificial Sequence
  Description of Artificial Sequence: Synthetic polypeptide
DIQMTQSPSSLSASVGDRVTITCRASPSISTYLNWYQQKPGKAPKLLIYTASRLQTGVPSRFSGSGSGTDFTLTISSLQPEDFATYYCQQTYSTPSSFGQGTKVEIK

SEQ ID NO: 3516 - protein, 107 aa, Artificial Sequence
  Description of Artificial Sequence: Synthetic polypeptide
DIQMTQSPSSLSASVGDRVTITCRASQNIAKYLNWYQQKPGKAPKLLIYGASGLQSGVPSRFSGSGSGTDFTLTISSLQPEDFATYYCQQSHSPPITFGQGTKVEIK

SEQ ID NO: 3517 - protein, 107 aa, Artificial Sequence
  Description of Artificial Sequence: Synthetic polypeptide
DIQMTQSPSSLSASVGDRVTITCRASQSIGTYLNWYQQKPGKAPKLLIYAASNLHSGVPSRFSGSGSGTDFTLTISSLQPEDFATYYCQESYSAPYTFGQGTKVEIK

SEQ ID NO: 3518 - protein, 107 aa, Artificial Sequence
  Description of Artificial Sequence: Synthetic polypeptide
DIQMTQSPSSLSASVGDRVTITCRASQSISPYLNWYQQKPGKAPKLLIYKASSLQSGVPSRFSGSGSGTDFTLTISSLQPEDFATYYCQQSSSTPYTFGQGTKVEIK

SEQ ID NO: 3519 - protein, 116 aa, Artificial Sequence; identical to SEQ ID NO: 3100
  Description of Artificial Sequence: Synthetic polypeptide

SEQ ID NO: 3520 - protein, 116 aa, Artificial Sequence; identical to SEQ ID NO: 3101
  Description of Artificial Sequence: Synthetic polypeptide

SEQ ID NO: 3521 - protein, 114 aa, Artificial Sequence; identical to SEQ ID NO: 3102
  Description of Artificial Sequence: Synthetic polypeptide

SEQ ID NO: 3522 - protein, 116 aa, Artificial Sequence; identical to SEQ ID NO: 3103
  Description of Artificial Sequence: Synthetic polypeptide

SEQ ID NO: 3523 - protein, 120 aa, Artificial Sequence; identical to SEQ ID NO: 3104
  Description of Artificial Sequence: Synthetic polypeptide

SEQ ID NO: 3524 - protein, 118 aa, Artificial Sequence; identical to SEQ ID NO: 3105
  Description of Artificial Sequence: Synthetic polypeptide

SEQ ID NO: 3525 - protein, 116 aa, Artificial Sequence; identical to SEQ ID NO: 3106
  Description of Artificial Sequence: Synthetic polypeptide

SEQ ID NO: 3526 - protein, 120 aa, Artificial Sequence; identical to SEQ ID NO: 3107
  Description of Artificial Sequence: Synthetic polypeptide

SEQ ID NO: 3527 - protein, 125 aa, Artificial Sequence; identical to SEQ ID NO: 3108
  Description of Artificial Sequence: Synthetic polypeptide

SEQ ID NO: 3528 - protein, 121 aa, Artificial Sequence; identical to SEQ ID NO: 3109
  Description of Artificial Sequence: Synthetic polypeptide

SEQ ID NO: 3529 - protein, 117 aa, Artificial Sequence; identical to SEQ ID NO: 3110
  Description of Artificial Sequence: Synthetic polypeptide

SEQ ID NO: 3530 - protein, 123 aa, Artificial Sequence; identical to SEQ ID NO: 3111
  Description of Artificial Sequence: Synthetic polypeptide

SEQ ID NO: 3531 - protein, 120 aa, Artificial Sequence; identical to SEQ ID NO: 3112
  Description of Artificial Sequence: Synthetic polypeptide

SEQ ID NO: 3532 - protein, 120 aa, Artificial Sequence; identical to SEQ ID NO: 3113
  Description of Artificial Sequence: Synthetic polypeptide

SEQ ID NO: 3533 - protein, 120 aa, Artificial Sequence; identical to SEQ ID NO: 3114
  Description of Artificial Sequence: Synthetic polypeptide

SEQ ID NO: 3534 - protein, 120 aa, Artificial Sequence; identical to SEQ ID NO: 3115
  Description of Artificial Sequence: Synthetic polypeptide

SEQ ID NO: 3535 - protein, 114 aa, Artificial Sequence; identical to SEQ ID NO: 3116
  Description of Artificial Sequence: Synthetic polypeptide

SEQ ID NO: 3536 - protein, 114 aa, Artificial Sequence; identical to SEQ ID NO: 3117
  Description of Artificial Sequence: Synthetic polypeptide

SEQ ID NO: 3537 - protein, 114 aa, Artificial Sequence; identical to SEQ ID NO: 3118
  Description of Artificial Sequence: Synthetic polypeptide

SEQ ID NO: 3538 - protein, 114 aa, Artificial Sequence; identical to SEQ ID NO: 3119
  Description of Artificial Sequence: Synthetic polypeptide

SEQ ID NO: 3539 - protein, 114 aa, Artificial Sequence; identical to SEQ ID NO: 3120
  Description of Artificial Sequence: Synthetic polypeptide

SEQ ID NO: 3540 - protein, 128 aa, Artificial Sequence; identical to SEQ ID NO: 3121
  Description of Artificial Sequence: Synthetic polypeptide

SEQ ID NO: 3541 - protein, 114 aa, Artificial Sequence; identical to SEQ ID NO: 3122
  Description of Artificial Sequence: Synthetic polypeptide

SEQ ID NO: 3542 - protein, 114 aa, Artificial Sequence; identical to SEQ ID NO: 3123
  Description of Artificial Sequence: Synthetic polypeptide

SEQ ID NO: 3543 - protein, 120 aa, Artificial Sequence; identical to SEQ ID NO: 3124
  Description of Artificial Sequence: Synthetic polypeptide

SEQ ID NO: 3544 - protein, 124 aa, Artificial Sequence; identical to SEQ ID NO: 3125
  Description of Artificial Sequence: Synthetic polypeptide

SEQ ID NO: 3545 - protein, 120 aa, Artificial Sequence; identical to SEQ ID NO: 3126
  Description of Artificial Sequence: Synthetic polypeptide

SEQ ID NO: 3546 - protein, 120 aa, Artificial Sequence; identical to SEQ ID NO: 3127
  Description of Artificial Sequence: Synthetic polypeptide

SEQ ID NO: 3547 - protein, 120 aa, Artificial Sequence; identical to SEQ ID NO: 3128
  Description of Artificial Sequence: Synthetic polypeptide

SEQ ID NO: 3548 - protein, 114 aa, Artificial Sequence; identical to SEQ ID NO: 3129
  Description of Artificial Sequence: Synthetic polypeptide

SEQ ID NO: 3549 - protein, 114 aa, Artificial Sequence; identical to SEQ ID NO: 3130
  Description of Artificial Sequence: Synthetic polypeptide

SEQ ID NO: 3550 - protein, 114 aa, Artificial Sequence; identical to SEQ ID NO: 3131
  Description of Artificial Sequence: Synthetic polypeptide

SEQ ID NO: 3551 - protein, 114 aa, Artificial Sequence; identical to SEQ ID NO: 3132
  Description of Artificial Sequence: Synthetic polypeptide

SEQ ID NO: 3552 - protein, 114 aa, Artificial Sequence; identical to SEQ ID NO: 3133
  Description of Artificial Sequence: Synthetic polypeptide

SEQ ID NO: 3553 - protein, 114 aa, Artificial Sequence; identical to SEQ ID NO: 3134
  Description of Artificial Sequence: Synthetic polypeptide

SEQ ID NO: 3554 - protein, 114 aa, Artificial Sequence; identical to SEQ ID NO: 3135
  Description of Artificial Sequence: Synthetic polypeptide

SEQ ID NO: 3555 - protein, 114 aa, Artificial Sequence; identical to SEQ ID NO: 3136
  Description of Artificial Sequence: Synthetic polypeptide

SEQ ID NO: 3556 - protein, 120 aa, Artificial Sequence; identical to SEQ ID NO: 3137
  Description of Artificial Sequence: Synthetic polypeptide

SEQ ID NO: 3557 - protein, 114 aa, Artificial Sequence; identical to SEQ ID NO: 3138
  Description of Artificial Sequence: Synthetic polypeptide

SEQ ID NO: 3558 - protein, 114 aa, Artificial Sequence; identical to SEQ ID NO: 3139
  Description of Artificial Sequence: Synthetic polypeptide

SEQ ID NO: 3559 - protein, 123 aa, Artificial Sequence; identical to SEQ ID NO: 3140
  Description of Artificial Sequence: Synthetic polypeptide

SEQ ID NO: 3560 - protein, 120 aa, Artificial Sequence; identical to SEQ ID NO: 3141
  Description of Artificial Sequence: Synthetic polypeptide

SEQ ID NO: 3561 - protein, 114 aa, Artificial Sequence; identical to SEQ ID NO: 3142
  Description of Artificial Sequence: Synthetic polypeptide

SEQ ID NO: 3562 - protein, 128 aa, Artificial Sequence; identical to SEQ ID NO: 3143
  Description of Artificial Sequence: Synthetic polypeptide

SEQ ID NO: 3563 - protein, 120 aa, Artificial Sequence; identical to SEQ ID NO: 3144
  Description of Artificial Sequence: Synthetic polypeptide

SEQ ID NO: 3564 - protein, 114 aa, Artificial Sequence; identical to SEQ ID NO: 3145
  Description of Artificial Sequence: Synthetic polypeptide

SEQ ID NO: 3565 - protein, 114 aa, Artificial Sequence; identical to SEQ ID NO: 3146
  Description of Artificial Sequence: Synthetic polypeptide

SEQ ID NO: 3566 - protein, 120 aa, Artificial Sequence; identical to SEQ ID NO: 3147
  Description of Artificial Sequence: Synthetic polypeptide

SEQ ID NO: 3567 - protein, 114 aa, Artificial Sequence; identical to SEQ ID NO: 3148
  Description of Artificial Sequence: Synthetic polypeptide

SEQ ID NO: 3568 - protein, 114 aa, Artificial Sequence; identical to SEQ ID NO: 3149
  Description of Artificial Sequence: Synthetic polypeptide

SEQ ID NO: 3569 - protein, 114 aa, Artificial Sequence; identical to SEQ ID NO: 3150
  Description of Artificial Sequence: Synthetic polypeptide

SEQ ID NO: 3570 - protein, 114 aa, Artificial Sequence; identical to SEQ ID NO: 3151
  Description of Artificial Sequence: Synthetic polypeptide

SEQ ID NO: 3571 - protein, 118 aa, Artificial Sequence; identical to SEQ ID NO: 3152
  Description of Artificial Sequence: Synthetic polypeptide

SEQ ID NO: 3572 - protein, 118 aa, Artificial Sequence; identical to SEQ ID NO: 3153
  Description of Artificial Sequence: Synthetic polypeptide

SEQ ID NO: 3573 - protein, 114 aa, Artificial Sequence; identical to SEQ ID NO: 3154
  Description of Artificial Sequence: Synthetic polypeptide

SEQ ID NO: 3574 - protein, 120 aa, Artificial Sequence; identical to SEQ ID NO: 3155
  Description of Artificial Sequence: Synthetic polypeptide

SEQ ID NO: 3575 - protein, 114 aa, Artificial Sequence; identical to SEQ ID NO: 3156
  Description of Artificial Sequence: Synthetic polypeptide

SEQ ID NO: 3576 - protein, 114 aa, Artificial Sequence; identical to SEQ ID NO: 3157
  Description of Artificial Sequence: Synthetic polypeptide

SEQ ID NO: 3577 - protein, 114 aa, Artificial Sequence; identical to SEQ ID NO: 3158
  Description of Artificial Sequence: Synthetic polypeptide

SEQ ID NO: 3578 - protein, 114 aa, Artificial Sequence; identical to SEQ ID NO: 3159
  Description of Artificial Sequence: Synthetic polypeptide

SEQ ID NO: 3579 - protein, 114 aa, Artificial Sequence; identical to SEQ ID NO: 3160
  Description of Artificial Sequence: Synthetic polypeptide

SEQ ID NO: 3580 - protein, 114 aa, Artificial Sequence; identical to SEQ ID NO: 3161
  Description of Artificial Sequence: Synthetic polypeptide

SEQ ID NO: 3581 - protein, 114 aa, Artificial Sequence; identical to SEQ ID NO: 3162
  Description of Artificial Sequence: Synthetic polypeptide

SEQ ID NO: 3582 - protein, 120 aa, Artificial Sequence; identical to SEQ ID NO: 3163
  Description of Artificial Sequence: Synthetic polypeptide

SEQ ID NO: 3583 - protein, 114 aa, Artificial Sequence; identical to SEQ ID NO: 3164
  Description of Artificial Sequence: Synthetic polypeptide

SEQ ID NO: 3584 - protein, 114 aa, Artificial Sequence; identical to SEQ ID NO: 3165
  Description of Artificial Sequence: Synthetic polypeptide

SEQ ID NO: 3585 - protein, 120 aa, Artificial Sequence; identical to SEQ ID NO: 3166
  Description of Artificial Sequence: Synthetic polypeptide

SEQ ID NO: 3586 - protein, 114 aa, Artificial Sequence; identical to SEQ ID NO: 3167
  Description of Artificial Sequence: Synthetic polypeptide

SEQ ID NO: 3587 - protein, 114 aa, Artificial Sequence; identical to SEQ ID NO: 3168
  Description of Artificial Sequence: Synthetic polypeptide

SEQ ID NO: 3588 - protein, 114 aa, Artificial Sequence; identical to SEQ ID NO: 3169
  Description of Artificial Sequence: Synthetic polypeptide

SEQ ID NO: 3589 - protein, 118 aa, Artificial Sequence; identical to SEQ ID NO: 3170
  Description of Artificial Sequence: Synthetic polypeptide

SEQ ID NO: 3590 - protein, 114 aa, Artificial Sequence; identical to SEQ ID NO: 3171
  Description of Artificial Sequence: Synthetic polypeptide

SEQ ID NO: 3591 - protein, 114 aa, Artificial Sequence; identical to SEQ ID NO: 3172
  Description of Artificial Sequence: Synthetic polypeptide

SEQ ID NO: 3592 - protein, 114 aa, Artificial Sequence; identical to SEQ ID NO: 3173
  Description of Artificial Sequence: Synthetic polypeptide

SEQ ID NO: 3593 - protein, 114 aa, Artificial Sequence; identical to SEQ ID NO: 3174
  Description of Artificial Sequence: Synthetic polypeptide

SEQ ID NO: 3594 - protein, 120 aa, Artificial Sequence; identical to SEQ ID NO: 3175
  Description of Artificial Sequence: Synthetic polypeptide

SEQ ID NO: 3595 - protein, 114 aa, Artificial Sequence; identical to SEQ ID NO: 3176
  Description of Artificial Sequence: Synthetic polypeptide

SEQ ID NO: 3596 - protein, 120 aa, Artificial Sequence; identical to SEQ ID NO: 3177
  Description of Artificial Sequence: Synthetic polypeptide

SEQ ID NO: 3597 - protein, 114 aa, Artificial Sequence; identical to SEQ ID NO: 3178
  Description of Artificial Sequence: Synthetic polypeptide

SEQ ID NO: 3598 - protein, 114 aa, Artificial Sequence; identical to SEQ ID NO: 3179
  Description of Artificial Sequence: Synthetic polypeptide

SEQ ID NO: 3599 - protein, 120 aa, Artificial Sequence; identical to SEQ ID NO: 3180
  Description of Artificial Sequence: Synthetic polypeptide

SEQ ID NO: 3600 - protein, 120 aa, Artificial Sequence; identical to SEQ ID NO: 3181
  Description of Artificial Sequence: Synthetic polypeptide

SEQ ID NO: 3601 - protein, 114 aa, Artificial Sequence; identical to SEQ ID NO: 3182
  Description of Artificial Sequence: Synthetic polypeptide

SEQ ID NO: 3602 - protein, 120 aa, Artificial Sequence; identical to SEQ ID NO: 3183
  Description of Artificial Sequence: Synthetic polypeptide

SEQ ID NO: 3603 - protein, 114 aa, Artificial Sequence; identical to SEQ ID NO: 3184
  Description of Artificial Sequence: Synthetic polypeptide

SEQ ID NO: 3604 - protein, 120 aa, Artificial Sequence; identical to SEQ ID NO: 3185
  Description of Artificial Sequence: Synthetic polypeptide

SEQ ID NO: 3605 - protein, 120 aa, Artificial Sequence; identical to SEQ ID NO: 3186
  Description of Artificial Sequence: Synthetic polypeptide

SEQ ID NO: 3606 - protein, 123 aa, Artificial Sequence; identical to SEQ ID NO: 3187
  Description of Artificial Sequence: Synthetic polypeptide

SEQ ID NO: 3607 - protein, 122 aa, Artificial Sequence; identical to SEQ ID NO: 3188
  Description of Artificial Sequence: Synthetic polypeptide

SEQ ID NO: 3608 - protein, 124 aa, Artificial Sequence; identical to SEQ ID NO: 3189
  Description of Artificial Sequence: Synthetic polypeptide

SEQ ID NO: 3609 - protein, 116 aa, Artificial Sequence; identical to SEQ ID NO: 3190
  Description of Artificial Sequence: Synthetic polypeptide

SEQ ID NO: 3610 - protein, 120 aa, Artificial Sequence; identical to SEQ ID NO: 3191
  Description of Artificial Sequence: Synthetic polypeptide

SEQ ID NO: 3611 - protein, 124 aa, Artificial Sequence; identical to SEQ ID NO: 3192
  Description of Artificial Sequence: Synthetic polypeptide

SEQ ID NO: 3612 - protein, 114 aa, Artificial Sequence; identical to SEQ ID NO: 3193
  Description of Artificial Sequence: Synthetic polypeptide

SEQ ID NO: 3613 - protein, 119 aa, Artificial Sequence; identical to SEQ ID NO: 3194
  Description of Artificial Sequence: Synthetic polypeptide

SEQ ID NO: 3614 - protein, 123 aa, Artificial Sequence; identical to SEQ ID NO: 3195
  Description of Artificial Sequence: Synthetic polypeptide

SEQ ID NO: 3615 - protein, 122 aa, Artificial Sequence; identical to SEQ ID NO: 3196
  Description of Artificial Sequence: Synthetic polypeptide

SEQ ID NO: 3616 - protein, 124 aa, Artificial Sequence; identical to SEQ ID NO: 3197
  Description of Artificial Sequence: Synthetic polypeptide

SEQ ID NO: 3617 - protein, 124 aa, Artificial Sequence; identical to SEQ ID NO: 3198
  Description of Artificial Sequence: Synthetic polypeptide

SEQ ID NO: 3618 - protein, 126 aa, Artificial Sequence; identical to SEQ ID NO: 3199
  Description of Artificial Sequence: Synthetic polypeptide

SEQ ID NO: 3619 - protein, 118 aa, Artificial Sequence; identical to SEQ ID NO: 3200
  Description of Artificial Sequence: Synthetic polypeptide

SEQ ID NO: 3620 - protein, 124 aa, Artificial Sequence; identical to SEQ ID NO: 3201
  Description of Artificial Sequence: Synthetic polypeptide

SEQ ID NO: 3621 - protein, 126 aa, Artificial Sequence; identical to SEQ ID NO: 3202
  Description of Artificial Sequence: Synthetic polypeptide

SEQ ID NO: 3622 - protein, 127 aa, Artificial Sequence; identical to SEQ ID NO: 3203
  Description of Artificial Sequence: Synthetic polypeptide

SEQ ID NO: 3623 - protein, 120 aa, Artificial Sequence; identical to SEQ ID NO: 3204
  Description of Artificial Sequence: Synthetic polypeptide

SEQ ID NO: 3624 - protein, 120 aa, Artificial Sequence; identical to SEQ ID NO: 3205
  Description of Artificial Sequence: Synthetic polypeptide

SEQ ID NO: 3625 - protein, 123 aa, Artificial Sequence; identical to SEQ ID NO: 3206
  Description of Artificial Sequence: Synthetic polypeptide

SEQ ID NO: 3626 - protein, 116 aa, Artificial Sequence; identical to SEQ ID NO: 3207
  Description of Artificial Sequence: Synthetic polypeptide

SEQ ID NO: 3627 - protein, 115 aa, Artificial Sequence; identical to SEQ ID NO: 3208
  Description of Artificial Sequence: Synthetic polypeptide

SEQ ID NO: 3628 - protein, 125 aa, Artificial Sequence; identical to SEQ ID NO: 3209
  Description of Artificial Sequence: Synthetic polypeptide

SEQ ID NO: 3629 - protein, 119 aa, Artificial Sequence; identical to SEQ ID NO: 3210
  Description of Artificial Sequence: Synthetic polypeptide

SEQ ID NO: 3630 - protein, 119 aa, Artificial Sequence; identical to SEQ ID NO: 3211
  Description of Artificial Sequence: Synthetic polypeptide

SEQ ID NO: 3631 - protein, 120 aa, Artificial Sequence; identical to SEQ ID NO: 3212
  Description of Artificial Sequence: Synthetic polypeptide

SEQ ID NO: 3632 - protein, 119 aa, Artificial Sequence; identical to SEQ ID NO: 3213
  Description of Artificial Sequence: Synthetic polypeptide

SEQ ID NO: 3633 - protein, 123 aa, Artificial Sequence; identical to SEQ ID NO: 3214
  Description of Artificial Sequence: Synthetic polypeptide

SEQ ID NO: 3634 - protein, 122 aa, Artificial Sequence; identical to SEQ ID NO: 3215
  Description of Artificial Sequence: Synthetic polypeptide

SEQ ID NO: 3635 - protein, 118 aa, Artificial Sequence; identical to SEQ ID NO: 3216
  Description of Artificial Sequence: Synthetic polypeptide

SEQ ID NO: 3636 - protein, 120 aa, Artificial Sequence; identical to SEQ ID NO: 3217
  Description of Artificial Sequence: Synthetic polypeptide

SEQ ID NO: 3637 - protein, 122 aa, Artificial Sequence; identical to SEQ ID NO: 3218
  Description of Artificial Sequence: Synthetic polypeptide

SEQ ID NO: 3638 - protein, 119 aa, Artificial Sequence; identical to SEQ ID NO: 3219
  Description of Artificial Sequence: Synthetic polypeptide

SEQ ID NO: 3639 - protein, 123 aa, Artificial Sequence; identical to SEQ ID NO: 3220
  Description of Artificial Sequence: Synthetic polypeptide

SEQ ID NO: 3640 - protein, 118 aa, Artificial Sequence; identical to SEQ ID NO: 3221
  Description of Artificial Sequence: Synthetic polypeptide

SEQ ID NO: 3641 - protein, 118 aa, Artificial Sequence; identical to SEQ ID NO: 3223
  Description of Artificial Sequence: Synthetic polypeptide

SEQ ID NO: 3642 - protein, 118 aa, Artificial Sequence; identical to SEQ ID NO: 3224
  Description of Artificial Sequence: Synthetic polypeptide

SEQ ID NO: 3643 - protein, 123 aa, Artificial Sequence; identical to SEQ ID NO: 3225
  Description of Artificial Sequence: Synthetic polypeptide

SEQ ID NO: 3644 - protein, 123 aa, Artificial Sequence; identical to SEQ ID NO: 3226
  Description of Artificial Sequence: Synthetic polypeptide

SEQ ID NO: 3645 - protein, 119 aa, Artificial Sequence; identical to SEQ ID NO: 3227
  Description of Artificial Sequence: Synthetic polypeptide

SEQ ID NO: 3646 - protein, 121 aa, Artificial Sequence; identical to SEQ ID NO: 3228
  Description of Artificial Sequence: Synthetic polypeptide

SEQ ID NO: 3647 - protein, 116 aa, Artificial Sequence; identical to SEQ ID NO: 3229
  Description of Artificial Sequence: Synthetic polypeptide

SEQ ID NO: 3648 - protein, 123 aa, Artificial Sequence; identical to SEQ ID NO: 3230
  Description of Artificial Sequence: Synthetic polypeptide

SEQ ID NO: 3649 - protein, 120 aa, Artificial Sequence; identical to SEQ ID NO: 3231
  Description of Artificial Sequence: Synthetic polypeptide

SEQ ID NO: 3650 - protein, 128 aa, Artificial Sequence; identical to SEQ ID NO: 3232
  Description of Artificial Sequence: Synthetic polypeptide

SEQ ID NO: 3651 - protein, 116 aa, Artificial Sequence; identical to SEQ ID NO: 3233
  Description of Artificial Sequence: Synthetic polypeptide

SEQ ID NO: 3652 - protein, 122 aa, Artificial Sequence; identical to SEQ ID NO: 3234
  Description of Artificial Sequence: Synthetic polypeptide

SEQ ID NO: 3653 - protein, 114 aa, Artificial Sequence; identical to SEQ ID NO: 3235
  Description of Artificial Sequence: Synthetic polypeptide

SEQ ID NO: 3654 - protein, 125 aa, Artificial Sequence; identical to SEQ ID NO: 3236
  Description of Artificial Sequence: Synthetic polypeptide

SEQ ID NO: 3655 - protein, 120 aa, Artificial Sequence; identical to SEQ ID NO: 3237
  Description of Artificial Sequence: Synthetic polypeptide

SEQ ID NO: 3656 - protein, 119 aa, Artificial Sequence; identical to SEQ ID NO: 3238
  Description of Artificial Sequence: Synthetic polypeptide

SEQ ID NO: 3657 - protein, 125 aa, Artificial Sequence; identical to SEQ ID NO: 3239
  Description of Artificial Sequence: Synthetic polypeptide

SEQ ID NO: 3658 - protein, 119 aa, Artificial Sequence; identical to SEQ ID NO: 3240
  Description of Artificial Sequence: Synthetic polypeptide

SEQ ID NO: 3659 - protein, 121 aa, Artificial Sequence; identical to SEQ ID NO: 63
  Description of Artificial Sequence: Synthetic polypeptide

SEQ ID NO: 3660 - protein, 115 aa, Artificial Sequence; identical to SEQ ID NO: 64
  Description of Artificial Sequence: Synthetic polypeptide

SEQ ID NO: 3661 - protein, 124 aa, Artificial Sequence; identical to SEQ ID NO: 65
  Description of Artificial Sequence: Synthetic polypeptide

SEQ ID NO: 3662 - protein, 123 aa, Artificial Sequence; identical to SEQ ID NO: 66
  Description of Artificial Sequence: Synthetic polypeptide

SEQ ID NO: 3663 - protein, 123 aa, Artificial Sequence; identical to SEQ ID NO: 67
  Description of Artificial Sequence: Synthetic polypeptide

SEQ ID NO: 3664 - protein, 114 aa, Artificial Sequence; identical to SEQ ID NO: 68
  Description of Artificial Sequence: Synthetic polypeptide

SEQ ID NO: 3665 - protein, 116 aa, Artificial Sequence; identical to SEQ ID NO: 69
  Description of Artificial Sequence: Synthetic polypeptide

SEQ ID NO: 3666 - protein, 114 aa, Artificial Sequence; identical to SEQ ID NO: 70
  Description of Artificial Sequence: Synthetic polypeptide

SEQ ID NO: 3667 - protein, 123 aa, Artificial Sequence; identical to SEQ ID NO: 71
  Description of Artificial Sequence: Synthetic polypeptide

SEQ ID NO: 3668 - protein, 115 aa, Artificial Sequence; identical to SEQ ID NO: 72
  Description of Artificial Sequence: Synthetic polypeptide

SEQ ID NO: 3669 - protein, 116 aa, Artificial Sequence; identical to SEQ ID NO: 73
  Description of Artificial Sequence: Synthetic polypeptide

SEQ ID NO: 3670 - protein, 115 aa, Artificial Sequence; identical to SEQ ID NO: 74
  Description of Artificial Sequence: Synthetic polypeptide

SEQ ID NO: 3671 - protein, 120 aa, Artificial Sequence; identical to SEQ ID NO: 75
  Description of Artificial Sequence: Synthetic polypeptide

SEQ ID NO: 3672 - protein, 114 aa, Artificial Sequence; identical to SEQ ID NO: 76
  Description of Artificial Sequence: Synthetic polypeptide

SEQ ID NO: 3673 - protein, 122 aa, Artificial Sequence; identical to SEQ ID NO: 77
  Description of Artificial Sequence: Synthetic polypeptide

SEQ ID NO: 3674 - protein, 123 aa, Artificial Sequence; identical to SEQ ID NO: 78
  Description of Artificial Sequence: Synthetic polypeptide

SEQ ID NO: 3675 - protein, 124 aa, Artificial Sequence; identical to SEQ ID NO: 79
  Description of Artificial Sequence: Synthetic polypeptide

SEQ ID NO: 3676 - protein, 117 aa, Artificial Sequence; identical to SEQ ID NO: 80
  Description of Artificial Sequence: Synthetic polypeptide

SEQ ID NO: 3677 - protein, 123 aa, Artificial Sequence; identical to SEQ ID NO: 81
  Description of Artificial Sequence: Synthetic polypeptide

SEQ ID NO: 3678 - protein, 124 aa, Artificial Sequence; identical to SEQ ID NO: 82
  Description of Artificial Sequence: Synthetic polypeptide

SEQ ID NO: 3679 - protein, 114 aa, Artificial Sequence; identical to SEQ ID NO: 83
  Description of Artificial Sequence: Synthetic polypeptide

SEQ ID NO: 3680 - protein, 114 aa, Artificial Sequence; identical to SEQ ID NO: 84
  Description of Artificial Sequence: Synthetic polypeptide

SEQ ID NO: 3681 - protein, 122 aa, Artificial Sequence; identical to SEQ ID NO: 85
  Description of Artificial Sequence: Synthetic polypeptide

SEQ ID NO: 3682 - protein, 117 aa, Artificial Sequence; identical to SEQ ID NO: 86
  Description of Artificial Sequence: Synthetic polypeptide

SEQ ID NO: 3683 - protein, 121 aa, Artificial Sequence; identical to SEQ ID NO: 87
  Description of Artificial Sequence: Synthetic polypeptide

SEQ ID NO: 3684 - protein, 122 aa, Artificial Sequence; identical to SEQ ID NO: 88
  Description of Artificial Sequence: Synthetic polypeptide

SEQ ID NO: 3685 - protein, 114 aa, Artificial Sequence; identical to SEQ ID NO: 89
  Description of Artificial Sequence: Synthetic polypeptide

SEQ ID NO: 3686 - protein, 123 aa, Artificial Sequence; identical to SEQ ID NO: 90
  Description of Artificial Sequence: Synthetic polypeptide

SEQ ID NO: 3687 - protein, 125 aa, Artificial Sequence; identical to SEQ ID NO: 91
  Description of Artificial Sequence: Synthetic polypeptide

SEQ ID NO: 3688 - protein, 119 aa, Artificial Sequence; identical to SEQ ID NO: 92
  Description of Artificial Sequence: Synthetic polypeptide

SEQ ID NO: 3689 - protein, 123 aa, Artificial Sequence; identical to SEQ ID NO: 93
  Description of Artificial Sequence: Synthetic polypeptide

SEQ ID NO: 3690 - protein, 121 aa, Artificial Sequence; identical to SEQ ID NO: 94
  Description of Artificial Sequence: Synthetic polypeptide

SEQ ID NO: 3691 - protein, 114 aa, Artificial Sequence; identical to SEQ ID NO: 95
  Description of Artificial Sequence: Synthetic polypeptide

SEQ ID NO: 3692 - protein, 114 aa, Artificial Sequence; identical to SEQ ID NO: 96
  Description of Artificial Sequence: Synthetic polypeptide

SEQ ID NO: 3693 - protein, 116 aa, Artificial Sequence; identical to SEQ ID NO: 97
  Description of Artificial Sequence: Synthetic polypeptide

SEQ ID NO: 3694 - protein, 123 aa, Artificial Sequence; identical to SEQ ID NO: 98
  Description of Artificial Sequence: Synthetic polypeptide

SEQ ID NO: 3695 - protein, 125 aa, Artificial Sequence; identical to SEQ ID NO: 99
  Description of Artificial Sequence: Synthetic polypeptide

SEQ ID NO: 3696 - protein, 118 aa, Artificial Sequence; identical to SEQ ID NO: 100
  Description of Artificial Sequence: Synthetic polypeptide

SEQ ID NO: 3697 - protein, 113 aa, Artificial Sequence; identical to SEQ ID NO: 101
  Description of Artificial Sequence: Synthetic polypeptide

SEQ ID NO: 3698 - protein, 114 aa, Artificial Sequence; identical to SEQ ID NO: 102
  Description of Artificial Sequence: Synthetic polypeptide

SEQ ID NO: 3699 - protein, 114 aa, Artificial Sequence; identical to SEQ ID NO: 103
  Description of Artificial Sequence: Synthetic polypeptide

SEQ ID NO: 3700 - protein, 123 aa, Artificial Sequence; identical to SEQ ID NO: 104
  Description of Artificial Sequence: Synthetic polypeptide

SEQ ID NO: 3701 - protein, 122 aa, Artificial Sequence; identical to SEQ ID NO: 105
  Description of Artificial Sequence: Synthetic polypeptide

SEQ ID NO: 3702 - protein, 112 aa, Artificial Sequence; identical to SEQ ID NO: 106
  Description of Artificial Sequence: Synthetic polypeptide

SEQ ID NO: 3703 - protein, 114 aa, Artificial Sequence; identical to SEQ ID NO: 107
  Description of Artificial Sequence: Synthetic polypeptide

SEQ ID NO: 3704 - protein, 116 aa, Artificial Sequence; identical to SEQ ID NO: 108
  Description of Artificial Sequence: Synthetic polypeptide

SEQ ID NO: 3705 - protein, 121 aa, Artificial Sequence; identical to SEQ ID NO: 109
  Description of Artificial Sequence: Synthetic polypeptide

SEQ ID NO: 3706 - protein, 123 aa, Artificial Sequence; identical to SEQ ID NO: 110
  Description of Artificial Sequence: Synthetic polypeptide

SEQ ID NO: 3707 - protein, 124 aa, Artificial Sequence; identical to SEQ ID NO: 111
  Description of Artificial Sequence: Synthetic polypeptide

SEQ ID NO: 3708 - protein, 114 aa, Artificial Sequence; identical to SEQ ID NO: 112
  Description of Artificial Sequence: Synthetic polypeptide

SEQ ID NO: 3709 - protein, 115 aa, Artificial Sequence; identical to SEQ ID NO: 113
  Description of Artificial Sequence: Synthetic polypeptide

SEQ ID NO: 3710 - protein, 124 aa, Artificial Sequence; identical to SEQ ID NO: 114
  Description of Artificial Sequence: Synthetic polypeptide

SEQ ID NO: 3711 - protein, 115 aa, Artificial Sequence; identical to SEQ ID NO: 115
  Description of Artificial Sequence: Synthetic polypeptide

SEQ ID NO: 3712 - protein, 118 aa, Artificial Sequence; identical to SEQ ID NO: 116
  Description of Artificial Sequence: Synthetic polypeptide

SEQ ID NO: 3713 - protein, 121 aa, Artificial Sequence; identical to SEQ ID NO: 117
  Description of Artificial Sequence: Synthetic polypeptide

SEQ ID NO: 3714 - protein, 117 aa, Artificial Sequence; identical to SEQ ID NO: 118
  Description of Artificial Sequence: Synthetic polypeptide

SEQ ID NO: 3715 - protein, 111 aa, Artificial Sequence; identical to SEQ ID NO: 119
  Description of Artificial Sequence: Synthetic polypeptide

SEQ ID NO: 3716 - protein, 121 aa, Artificial Sequence; identical to SEQ ID NO: 120
  Description of Artificial Sequence: Synthetic polypeptide

SEQ ID NO: 3717 - protein, 112 aa, Artificial Sequence; identical to SEQ ID NO: 121
  Description of Artificial Sequence: Synthetic polypeptide

SEQ ID NO: 3718 - protein, 113 aa, Artificial Sequence; identical to SEQ ID NO: 122
  Description of Artificial Sequence: Synthetic polypeptide

SEQ ID NO: 3719 - protein, 111 aa, Artificial Sequence; identical to SEQ ID NO: 123
  Description of Artificial Sequence: Synthetic polypeptide

SEQ ID NO: 3720 - protein, 123 aa, Artificial Sequence; identical to SEQ ID NO: 124
  Description of Artificial Sequence: Synthetic polypeptide

SEQ ID NO: 3721 - protein, 111 aa, Artificial Sequence; identical to SEQ ID NO: 125
  Description of Artificial Sequence: Synthetic polypeptide

SEQ ID NO: 3722 - protein, 112 aa, Artificial Sequence; identical to SEQ ID NO: 126
  Description of Artificial Sequence: Synthetic polypeptide

SEQ ID NO: 3723 - protein, 117 aa, Artificial Sequence; identical to SEQ ID NO: 127
  Description of Artificial Sequence: Synthetic polypeptide

SEQ ID NO: 3724 - protein, 124 aa, Artificial Sequence; identical to SEQ ID NO: 128
  Description of Artificial Sequence: Synthetic polypeptide

SEQ ID NO: 3725 - protein, 114 aa, Artificial Sequence; identical to SEQ ID NO: 129
  Description of Artificial Sequence: Synthetic polypeptide

SEQ ID NO: 3726 - protein, 114 aa, Artificial Sequence; identical to SEQ ID NO: 130
  Description of Artificial Sequence: Synthetic polypeptide

SEQ ID NO: 3727 - protein, 117 aa, Artificial Sequence; identical to SEQ ID NO: 131
  Description of Artificial Sequence: Synthetic polypeptide

SEQ ID NO: 3728 - protein, 124 aa, Artificial Sequence; identical to SEQ ID NO: 132
  Description of Artificial Sequence: Synthetic polypeptide

SEQ ID NO: 3729 - protein, 119 aa, Artificial Sequence; identical to SEQ ID NO: 133
  Description of Artificial Sequence: Synthetic polypeptide

SEQ ID NO: 3730 - protein, 123 aa, Artificial Sequence; identical to SEQ ID NO: 134
  Description of Artificial Sequence: Synthetic polypeptide

SEQ ID NO: 3731 - protein, 118 aa, Artificial Sequence; identical to SEQ ID NO: 135
  Description of Artificial Sequence: Synthetic polypeptide

SEQ ID NO: 3732 - protein, 118 aa, Artificial Sequence; identical to SEQ ID NO: 136
  Description of Artificial Sequence: Synthetic polypeptide

SEQ ID NO: 3733 - protein, 120 aa, Artificial Sequence; identical to SEQ ID NO: 137
  Description of Artificial Sequence: Synthetic polypeptide

SEQ ID NO: 3734 - protein, 117 aa, Artificial Sequence; identical to SEQ ID NO: 138
  Description of Artificial Sequence: Synthetic polypeptide

SEQ ID NO: 3735 - protein, 116 aa, Artificial Sequence; identical to SEQ ID NO: 139
  Description of Artificial Sequence: Synthetic polypeptide

SEQ ID NO: 3736 - protein, 114 aa, Artificial Sequence; identical to SEQ ID NO: 140
  Description of Artificial Sequence: Synthetic polypeptide

SEQ ID NO: 3737 - protein, 113 aa, Artificial Sequence; identical to SEQ ID NO: 141
  Description of Artificial Sequence: Synthetic polypeptide

SEQ ID NO: 3738 - protein, 123 aa, Artificial Sequence
  Description of Artificial Sequence: Synthetic polypeptide
EVQLVESGGGLVQPGGSLRLSCAASGRTFSRLAMGWFRQAPGKEREFVAAISRSGRSTSYADSVKGRFTISADNSKNTAYLQMNSLKPEDTAVYYCAARRSQILFTSRTDYEWGQGTLVTVSS

SEQ ID NO: 3739 - protein, 126 aa, Artificial Sequence
  Description of Artificial Sequence: Synthetic polypeptide
EVQLVESGGGLVQPGGSLRLSCAASGSFSIAAMGWFRQAPGKEREFVATINYSGGGTYYADSVKGRFTISADNSKNTAYLQMNSLKPEDTAVYYCAAVNTFDESAYAAFACYDVVWGQGTLVTVSS

SEQ ID NO: 3740 - protein, 123 aa, Artificial Sequence
  Description of Artificial Sequence: Synthetic polypeptide
EVQLVESGGGLVQPGGSLRLSCAASGRTFSRYAMGWFRQAPGKEREFVAAISRSGKSTYYADSVKGRFTISADNSKNTAYLQMNSLKPEDTAVYYCAASSVFSDLRYRKNPKWGQGTLVTVSS

SEQ ID NO: 3741 - protein, 144 aa, Artificial Sequence
  Description of Artificial Sequence: Synthetic polypeptide
EVQLVESGGGLVQPGGSLRLSCAASGRTFSKYAMGWFRQAPGKEREFVSHISRDGGRTFSSSTMGWFRQAPGKERELVALITPSSRTTYYADSVKGRFTISADNSKNTAYLQMNSLKPEDTAVYYCAIAGRGRWGQGTLVTVSS

SEQ ID NO: 3742 - protein, 123 aa, Artificial Sequence
  Description of Artificial Sequence: Synthetic polypeptide
EVQLVESGGGLVQPGGSLRLSCAASGRTFRRYAMGWFRQAPGKEREFVASINWGGGNTYYADSVKGRFTISADNSKNTAYLQMNSLKPEDTAVYYCAKTKRTGIFTTARMVDWGQGTLVTVSS

SEQ ID NO: 3743 - protein, 129 aa, Artificial Sequence
  Description of Artificial Sequence: Synthetic polypeptide
EVQLVESGGGLVQPGGSLRLSCAASGRTFSRFAMGWFRQAPGKEREFVAAIRWSGGRTVYADSVKGRFTISADNSKNTAYLQMNSLKPEDTAVYYCAIEPGTIRNWRNRVPFARGNFGWGQGTLVTVSS

SEQ ID NO: 3744 - protein, 121 aa, Artificial Sequence
  Description of Artificial Sequence: Synthetic polypeptide
EVQLVESGGGLVQPGGSLRLSCAASGLGIAFSRRTAMGWFRQAPGKEREFVAAISWRGGNTYYADSVKGRFTISADNSKNTAYLQMNSLKPEDTAVYYCAARRWIPPGPIWGQGTLVTVSS

SEQ ID NO: 3745 - protein, 122 aa, Artificial Sequence
  Description of Artificial Sequence: Synthetic polypeptide
EVQLVESGGGLVQPGGSLRLSCAASGRTFRRYPMGWFRQAPGKEREFVAAISRSGGSTYYADSVKGRFTISADNSKNTAYLQMNSLKPEDTAVYYCAAKRLRSFASGGSYDWGQGTLVTVSS

SEQ ID NO: 3746 - protein, 123 aa, Artificial Sequence
  Description of Artificial Sequence: Synthetic polypeptide
EVQLVESGGGLVQPGGSLRLSCAASGGTLRGYGMGWFRQAPGKEREFVASISRSGGSTYYADSVKGRFTISADNSKNTAYLQMNSLKPEDTAVYYCAARRRVTLFTSRADYDWGQGTLVTVSS

SEQ ID NO: 3747 - protein, 118 aa, Artificial Sequence
  Description of Artificial Sequence: Synthetic polypeptide
EVQLVESGGGLVQPGGSLRLSCAASGRMFSSRSMGWFRQAPGKEREFVALINRSGGSQFYADSVKGRFTISADNSKNTAYLQMNSLKPEDTAVYYCAARRWIPPGPIWGQGTLVTVSS

SEQ ID NO: 3748 - protein, 122 aa, Artificial Sequence
  Description of Artificial Sequence: Synthetic polypeptide
EVQLVESGGGLVQPGGSLRLSCAASGRTFGRRAMGWFRQAPGKEREFVAGISRGGGTNYADSVKGRFTISADNSKNTAYLQMNSLKPEDTAVYYCAAKGIWDYLGRRDFGDWGQGTLVTVSS

SEQ ID NO: 3749 - protein, 131 aa, Artificial Sequence
  Description of Artificial Sequence: Synthetic polypeptide
EVQLVESGGGLVQPGGSLRLSCAASGLSSPPFDDFPMGWFRQAPGKEREFVSSIYSDDGDSMYADSVKGRFTISADNSKNTAYLQMNSLKPEDTAVYYCARQTFDFWSASLGGNFWYFDLWGQGTLVTVSS

SEQ ID NO: 3750 - protein, 117 aa, Artificial Sequence
  Description of Artificial Sequence: Synthetic polypeptide
EVQLVESGGGLVQPGGSLRLSCAASGGTFSSYSMGWFRQAPGKEREFVSAISWIIGSGGTTNYADSVKGRFTISADNSKNTAYLQMNSLKPEDTAVYYCTAGAGDSWGQGTLVTVSS

SEQ ID NO: 3751 - protein, 120 aa, Artificial Sequence
  Description of Artificial Sequence: Synthetic polypeptide
EVQLVESGGGLVQPGGSLRLSCAASGSIFSTRTMGWFRQAPGKEREFVASITKFGSTNYADSVKGRFTISADNSKNTAYLQMNSLKPEDTAVYYCTRGGGRFFDWLYLRWGQGTLVTVSS

SEQ ID NO: 3752 - protein, 125 aa, Artificial Sequence
  Description of Artificial Sequence: Synthetic polypeptide
EVQLVESGGGLVQPGGSLRLSCAASGRTLWRSNMGWFRQAPGKEREFVASISSFGSTKYADSVKGRFTISADNSKNTAYLQMNSLKPEDTAVYYCARGHGRYFDWLLFARPPDYWGQGTLVTVSS

SEQ ID NO: 3753 - protein, 120 aa, Artificial Sequence
  Description of Artificial Sequence: Synthetic polypeptide
EVQLVESGGGLVQPGGSLRLSCAASGRSLGIYRMGWFRQAPGKEREFVAAITSGGRKNYADSVKGRFTISADNSKNTAYLQMNSLKPEDTAVYYCAKRTIFGVGRWLDPWGQGTLVTVSS

SEQ ID NO: 3754 - protein, 124 aa, Artificial Sequence
  Description of Artificial Sequence: Synthetic polypeptide
EVQLVESGGGLVQPGGSLRLSCAASGTTLTFRIMGWFRQAPGKEREFVPAISSTGLASYTDSVKGRFTISADNSKNTAYLQMNSLKPEDTAVYYCSKDRAPNCFACCPNGFDVWGQGTLVTVSS

SEQ ID NO: 3755 - protein, 121 aa, Artificial Sequence
  Description of Artificial Sequence: Synthetic polypeptide
EVQLVESGGGLVQPGGSLRLSCAASGSRFSGRFNILNMGWFRQAPGKEREFVARIGYSGQSISYADSVKGRFTISADNSKNTAYLQMNSLKPEDTAVYYCARGRFLGGTEWGQGTLVTVSS

SEQ ID NO: 3756 - protein, 122 aa, Artificial Sequence
  Description of Artificial Sequence: Synthetic polypeptide
EVQLVESGGGLVQPGGSLRLSCAASGTLFKINAMGWFRQAPGKEREFVAQINRHGVTYYADSVKGRFTISADNSKNTAYLQMNSLKPEDTAVYYCARGRTIFFGGGRYFDYWGQGTLVTVSS

SEQ ID NO: 3757 - protein, 130 aa, Artificial Sequence
  Description of Artificial Sequence: Synthetic polypeptide
EVQLVESGGGLVQPGGSLRLSCAASGIPFRSRTMGWFRQAPGKEREFVAGITGSGRSQYYADSVKGRFTISADNSKNTAYLQMNSLKPEDTAVYYCARGARIFGSVAPWRGGNYYGMDVWGQGTLVTVSS

SEQ ID NO: 3758 - protein, 119 aa, Artificial Sequence
  Description of Artificial Sequence: Synthetic polypeptide
EVQLVESGGGLVQPGGSLRLSCAASGFTFSSFRMGWFRQAPGKEREFVAGISRGGSTNYADSVKGRFTISADNSKNTAYLQMNSLKPEDTAVYYCARASGLWFRRPHVWGQGTLVTVSS

SEQ ID NO: 3759 - protein, 126 aa, Artificial Sequence
  Description of Artificial Sequence: Synthetic polypeptide
EVQLVESGGGLVQPGGSLRLSCAASGRNFRRNSMGWFRQAPGKEREFVAGISWSGARTHYADSVKGRFTISADNSKNTAYLQMNSLKPEDTAVYYCARVSRRPRSPPGYYYGMDVWGQGTLVTVSS

SEQ ID NO: 3760 - protein, 125 aa, Artificial Sequence
  Description of Artificial Sequence: Synthetic polypeptide
EVQLVESGGGLVQPGGSLRLSCAASGRNLRMYRMGWFRQAPGKEREFVATIRWSDGSTYYADSVKGRFTISADNSKNTAYLQMNSLKPEDTAVYYCTRARLRYFDWLFPTNFDYWGQGTLVTVSS

SEQ ID NO: 3761 - protein, 122 aa, Artificial Sequence
  Description of Artificial Sequence: Synthetic polypeptide
EVQLVESGGGLVQPGGSLRLSCAASGGLTFSSNTMGWFRQAPGKEREFVASISSSGRTSYADSVKGRFTISADNSKNTAYLQMNSLKPEDTAVYYCARRVRRLWFRSYFDLWGQGTLVTVSS

SEQ ID NO: 3762 - protein, 121 aa, Artificial Sequence
  Description of Artificial Sequence: Synthetic polypeptide
EVQLVESGGGLVQPGGSLRLSCAASGFTLAYYAMGWFRQAPGKEREFVAAISWSGRNINYADSVKGRFTISADNSKNTAYLQMNSLKPEDTAVYYCARERARWFGKFSVSWGQGTLVTVSS

SEQ ID NO: 3763 - protein, 115 aa, Artificial Sequence
  Description of Artificial Sequence: Synthetic polypeptide
EVQLVESGGGLVQPGGSLRLSCAASGRTFSSFPMGWFRQAPGKEREFVAAISWSGSTSYADSVKGRFTISADNSKNTAYLQMNSLKPEDTAVYYSACGRLGFGAWGQGTLVTVSS

SEQ ID NO: 3764 - protein, 125 aa, Artificial Sequence
  Description of Artificial Sequence: Synthetic polypeptide
EVQLVESGGGLVQPGGSLRLSCAASGISSSKRNMGWFRQAPGKEREFVATWTSRGITTYADSVKGRFTISADNSKNTAYLQMNSLKPEDTAVYYCARGGPPRLWGSYRRKYFDYWGQGTLVTVSS

SEQ ID NO: 3765 - protein, 117 aa, Artificial Sequence
  Description of Artificial Sequence: Synthetic polypeptide
EVQLVESGGGLVQPGGSLRLSCAASGRTFSIYAMGWFRQAPGKEREFVARITRGGITKYADSVKGRFTISADNSKNTAYLQMNSLKPEDTAVYYCARGLGWLLGYYWGQGTLVTVSS

SEQ ID NO: 3766 - protein, 120 aa, Artificial Sequence
  Description of Artificial Sequence: Synthetic polypeptide
EVQLVESGGGLVQPGGSLRLSCAASGRMYNSYSMGWFRQAPGKEREFVARISPGGTFYADSVKGRFTISADNSKNTAYLQMNSLKPEDTAVYYCTTSARSGWFWRYFDSWGQGTLVTVSS

SEQ ID NO: 3767 - protein, 124 aa, Artificial Sequence
  Description of Artificial Sequence: Synthetic polypeptide
EVQLVESGGGLVQPGGSLRLSCAASGRTFRSYGMGWFRQAPGKEREFVASISRSGTTMYADSVKGRFTISADNSKNTAYLQMNSLKPEDTAVYYCARRGLLQWFGAPNSWFDPWGQGTLVTVSS

SEQ ID NO: 3768 - protein, 121 aa, Artificial Sequence
  Description of Artificial Sequence: Synthetic polypeptide
EVQLVESGGGLVQPGGSLRLSCAASGRTIRTMGWFRQAPGKEREFVATINSRGITNYADSVKGRFTISADNSKNTAYLQMNSLKPEDTAVYYCTTERDGLLWFRELFRPSWGQGTLVTVSS

SEQ ID NO: 3769 - protein, 120 aa, Artificial Sequence
  Description of Artificial Sequence: Synthetic polypeptide
EVQLVESGGGLVQPGGSLRLSCAASGRSFSFNAMGWFRQAPGKEREFVARISRFGRTNYADSVKGRFTISADNSKNTAYLQMNSLKPEDTAVYYCAKVHSYVWGGHSDYWGQGTLVTVSS

SEQ ID NO: 3770 - protein, 123 aa, Artificial Sequence
  Description of Artificial Sequence: Synthetic polypeptide
EVQLVESGGGLVQPGGSLRLSCAASGRTYYAMGWFRQAPGKEREFVGAIDWSGRRITYADSVKGRFTISADNSKNTAYLQMNSLKPEDTAVYYCARVRFSRLGGVIGRPIDSWGQGTLVTVSS

SEQ ID NO: 3771 - protein, 120 aa, Artificial Sequence
  Description of Artificial Sequence: Synthetic polypeptide
EVQLVESGGGLVQPGGSLRLSCAASGRAFRRYTMGWFRQAPGKEREFVASITKFGSTNYADSVKGRFTISADNSKNTAYLQMNSLKPEDTAVYYCAKDRGVLWFGELWYWGQGTLVTVSS

SEQ ID NO: 3772 - protein, 128 aa, Artificial Sequence
  Description of Artificial Sequence: Synthetic polypeptide
EVQLVESGGGLVQPGGSLRLSCAASGRTFSNYRMGWFRQAPGKEREFVASINRGGSTKYADSVKGRFTISADNSKNTAYLQMNSLKPEDTAVYYCASGKGGSATIFHLSRRPLYFDYWGQGTLVTVSS

SEQ ID NO: 3773 - protein, 125 aa, Artificial Sequence
  Description of Artificial Sequence: Synthetic polypeptide
EVQLVESGGGLVQPGGSLRLSCAASGITFSPYAMGWFRQAPGKEREFVATINWSGGYTVYADSVKGRFTISADNSKNTAYLQMNSLKPEDTAVYYCAKRKNRGPLWFGGGGWGYWGQGTLVTVSS

SEQ ID NO: 3774 - protein, 130 aa, Artificial Sequence
  Description of Artificial Sequence: Synthetic polypeptide
EVQLVESGGGLVQPGGSLRLSCAASGRTFSGFTMSSTWMGWFRQAPGKEREFVAGIITNGSTNYADSVKGRFTISADNSKNTAYLQMNSLKPEDTAVYYCARRVAYSSFWSGLRKHMDVWGQGTLVTVSS

SEQ ID NO: 3775 - protein, 118 aa, Artificial Sequence
  Description of Artificial Sequence: Synthetic polypeptide
EVQLVESGGGLVQPGGSLRLSCAASGRTFRRYSMGWFRQAPGKEREFVASITPGGNTNYADSVKGRFTISADNSKNTAYLQMNSLKPEDTAVYYCASRRRWLTPYIFWGQGTLVTVSS

SEQ ID NO: 3776 - protein, 116 aa, Artificial Sequence
  Description of Artificial Sequence: Synthetic polypeptide
EVQLVESGGGLVQPGGSLRLSCAASGSIFSIGMGWFRQAPGKEREFVARIWWRSGATYYADSVKGRFTISADNSKNTAYLQMNSLKPEDTAVYYCAAISIFGRLKWGQGTLVTVSS

SEQ ID NO: 3777 - protein, 126 aa, Artificial Sequence
  Description of Artificial Sequence: Synthetic polypeptide
EVQLVESGGGLVQPGGSLRLSCAASGRTFTSYRMGWFRQAPGKEREFVAEISSSGGYTYYADSVKGRFTISADNSKNTAYLQMNSLKPEDTAVYYCARVGPLRFLAQRPRLRPDYWGQGTLVTVSS

SEQ ID NO: 3778 - protein, 122 aa, Artificial Sequence
  Description of Artificial Sequence: Synthetic polypeptide
EVQLVESGGGLVQPGGSLRLSCAASGRTFSSFRFRAMGWFRQAPGKEREFVALIFSGGSTYYADSVKGRFTISADNSKNTAYLQMNSLKPEDTAVYYCAREWGRWLQRGSYWGQGTLVTVSS

SEQ ID NO: 3779 - protein, 128 aa, Artificial Sequence
  Description of Artificial Sequence: Synthetic polypeptide
EVQLVESGGGLVQPGGSLRLSCAASGRTFGSYGMGWFRQAPGKEREFVATISIGGRTYYADSVKGRFTISADNSKNTAYLQMNSLKPEDTAVYYCARGSGSGFMWYHGNNNYDRWRYWGQGTLVTVSS

SEQ ID NO: 3780 - protein, 123 aa, Artificial Sequence
  Description of Artificial Sequence: Synthetic polypeptide
EVQLVESGGGLVQPGGSLRLSCAASGRTFRSYPMGWFRQAPGKEREFVASINRGGSTNYADSVKGRFTISADNSKNTAYLQMNSLKPEDTAVYYCARGRYDFWSGYYRWFDPWGQGTLVTVSS

SEQ ID NO: 3781 - protein, 127 aa, Artificial Sequence
  Description of Artificial Sequence: Synthetic polypeptide
EVQLVESGGGLVQPGGSLRLSCAASGRTFSRSDMGWFRQAPGKEREFVAAISWSGGSTSYADSVKGRFTISADNSKNTAYLQMNSLKPEDTAVYYCATVPPPRRFLEWLPRRLTYIWGQGTLVTVSS

SEQ ID NO: 3782 - protein, 116 aa, Artificial Sequence
  Description of Artificial Sequence: Synthetic polypeptide
EVQLVESGGGLVQPGGSLRLSCAASGRTFRRYTMGWFRQAPGKEREFVASMRGSRSYYADSVKGRFTISADNSKNTAYLQMNSLKPEDTAVYYCARMSGFPFLDYWGQGTLVTVSS

SEQ ID NO: 3783 - protein, 122 aa, Artificial Sequence
  Description of Artificial Sequence: Synthetic polypeptide
EVQLVESGGGLVQPGGSLRLSCAASGSIFRLSTMGWFRQAPGKEREFVASISSFGSTYYADSVKGRFTISADNSKNTAYLQMNSLKPEDTAVYYCARTRGIFLWFGESFDYWGQGTLVTVSS

SEQ ID NO: 3784 - protein, 122 aa, Artificial Sequence
  Description of Artificial Sequence: Synthetic polypeptide
EVQLVESGGGLVQPGGSLRLSCAASGIAFRIRTMGWFRQAPGKEREFVASITSGGSTNYADSVKGRFTISADNSKNTAYLQMNSLKPEDTAVYYCARGGPRFGGFRGYFDPWGQGTLVTVSS

SEQ ID NO: 3785 - protein, 119 aa, Artificial Sequence
  Description of Artificial Sequence: Synthetic polypeptide
EVQLVESGGGLVQPGGSLRLSCAASGFTFTSYRMGWFRQAPGKEREFVAGISRFFGTAYYADSVKGRFTISADNSKNTAYLQMNSLKPEDTAVYYCARVTRWFGGLDVWGQGTLVTVSS

SEQ ID NO: 3786 - protein, 122 aa, Artificial Sequence
  Description of Artificial Sequence: Synthetic polypeptide
EVQLVESGGGLVQPGGSLRLSCAASGRTFSRYVMGWFRQAPGKEREFVASISRFGRTNYADSVKGRFTISADNSKNTAYLQMNSLKPEDTAVYYCARHHGLGILWWGTMDVWGQGTLVTVSS

SEQ ID NO: 3787 - protein, 116 aa, Artificial Sequence
  Description of Artificial Sequence: Synthetic polypeptide
EVQLVESGGGLVQPGGSLRLSCAASGRTFSMGWFRQAPGKEREFVASISRFGRTNYADSVKGRFTISADNSKNTAYLQMNSLKPEDTAVYYCAKRSTWLPQHFDSWGQGTLVTVSS

SEQ ID NO: 3788 - protein, 121 aa, Artificial Sequence
  Description of Artificial Sequence: Synthetic polypeptide
EVQLVESGGGLVQPGGSLRLSCAASGRTFSTYTMGWFRQAPGKEREFVARIWRSGGNTYYADSVKGRFTISADNSKNTAYLQMNSLKPEDTAVYYCARGVRGVFRAYFDHWGQGTLVTVSS

SEQ ID NO: 3789 - protein, 127 aa, Artificial Sequence
  Description of Artificial Sequence: Synthetic polypeptide
EVQLVESGGGLVQPGGSLRLSCAASGRNLRMYRMGWFRQAPGKEREFVALISRVGVTSYADSVKGRFTISADNSKNTAYLQMNSLKPEDTAVYYCARGTSFFNFWSGSLGRVGFDSWGQGTLVTVSS

SEQ ID NO: 3790 - protein, 123 aa, Artificial Sequence
  Description of Artificial Sequence: Synthetic polypeptide
EVQLVESGGGLVQPGGSLRLSCAASGITIRTHAMGWFRQAPGKEREFVATISRSGGNTYYADSVKGRFTISADNSKNTAYLQMNSLKPEDTAVYYCTTAGVLRYFDWFRRPYWGQGTLVTVSS

SEQ ID NO: 3791 - protein, 125 aa, Artificial Sequence
  Description of Artificial Sequence: Synthetic polypeptide
EVQLVESGGGLVQPGGSLRLSCAASGRTFRRYHMGWFRQAPGKEREFVAAITSGGRTNYADSVKGRFTISADNSKNTAYLQMNSLKPEDTAVYYCTTDGLRYFDWFPWASAFDIWGQGTLVTVSS

SEQ ID NO: 3792 - protein, 118 aa, Artificial Sequence
  Description of Artificial Sequence: Synthetic polypeptide
EVQLVESGGGLVQPGGSLRLSCAASGRTFRRYTMGWFRQAPGKEREFVAVISWSGGSTKYADSVKGRFTISADNSKNTAYLQMNSLKPEDTAVYYCARKGRWSGMNVWGQGTLVTVSS

SEQ ID NO: 3793 - protein, 126 aa, Artificial Sequence
  Description of Artificial Sequence: Synthetic polypeptide
EVQLVESGGGLVQPGGSLRLSCAASGRTFSWYPMGWFRQAPGKEREFVASISWGGARTYYADSVKGRFTISADNSKNTAYLQMNSLKPEDTAVYYCARSTGPRGSGRYRAHWFDSWGQGTLVTVSS

SEQ ID NO: 3794 - protein, 118 aa, Artificial Sequence
  Description of Artificial Sequence: Synthetic polypeptide
EVQLVESGGGLVQPGGSLRLSCAASGRTFTSYRMGWFRQAPGKEREFVAAITWNSGRTRYADSVKGRFTISADNSKNTAYLQMNSLKPEDTAVYYCSPSSWPFYFGAWGQGTLVTVSS

SEQ ID NO: 3795 - protein, 128 aa, Artificial Sequence
  Description of Artificial Sequence: Synthetic polypeptide
EVQLVESGGGLVQPGGSLRLSCAASGRPLRRYVMGWFRQAPGKEREFVAAITNGGSTKYADSVKGRFTISADNSKNTAYLQMNSLKPEDTAVYYCARGTPWRLLWFGTLGPPPAFDYWGQGTLVTVSS

SEQ ID NO: 3796 - protein, 120 aa, Artificial Sequence
  Description of Artificial Sequence: Synthetic polypeptide
EVQLVESGGGLVQPGGSLRLSCAASGRTFRRYAMGWFRQAPGKEREFVAAINRSGSTEYADSVKGRFTISADNSKNTAYLQMNSLKPEDTAVYYCARQHQDFWTGYYTVWGQGTLVTVSS

SEQ ID NO: 3797 - protein, 122 aa, Artificial Sequence
  Description of Artificial Sequence: Synthetic polypeptide
EVQLVESGGGLVQPGGSLRLSCAASGRTFRRYTMGWFRQAPGKEREFVASISRSGTTYYADSVKGRFTISADNSKNTAYLQMNSLKPEDTAVYYCAKEGWRWLQLRGGFDYWGQGTLVTVSS

SEQ ID NO: 3798 - protein, 121 aa, Artificial Sequence
  Description of Artificial Sequence: Synthetic polypeptide
EVQLVESGGGLVQPGGSLRLSCAASGRTLSTYNMGWFRQAPGKEREFVASISRFGRTNYADSVKGRFTISADNSKNTAYLQMNSLKPEDTAVYYCARRGKLSAAMHWFDPWGQGTLVTVSS

SEQ ID NO: 3799 - protein, 117 aa, Artificial Sequence
  Description of Artificial Sequence: Synthetic polypeptide
EVQLVESGGGLVQPGGSLRLSCAASGRFFSTRVMGWFRQAPGKEREFVARIWPGGSTYYADSVKGRFTISADNSKNTAYLQMNSLKPEDTAVYYCARDRGIFGVSRWGQGTLVTVSS

SEQ ID NO: 3800 - protein, 117 aa, Artificial Sequence
  Description of Artificial Sequence: Synthetic polypeptide
EVQLVESGGGLVQPGGSLRLSCAASGRFFSICSMGWFRQAPGKEREFVAGINWRSGGSTYYADSVKGRFTISADNSKNTAYLQMNSLKPEDTAVYYCARGSGWWEYWGQGTLVTVSS

SEQ ID NO: 3801 - protein, 124 aa, Artificial Sequence
  Description of Artificial Sequence: Synthetic polypeptide
EVQLVESGGGLVQPGGSLRLSCAASGRMFSSRSNMGWFRQAPGKEREFVASISSGGTTAYADSVKGRFTISADNSKNTAYLQMNSLKPEDTAVYYCARGFGRRFLEWLPRFDYWGQGTLVTVSS

SEQ ID NO: 3802 - protein, 120 aa, Artificial Sequence
  Description of Artificial Sequence: Synthetic polypeptide
EVQLVESGGGLVQPGGSLRLSCAASGRTFSSARMGWFRQAPGKEREFVAGINMISSTKYADSVKGRFTISADNSKNTAYLQMNSLKPEDTAVYYCAHFRRFLPRGYVDYWGQGTLVTVSS

SEQ ID NO: 3803 - protein, 125 aa, Artificial Sequence
  Description of Artificial Sequence: Synthetic polypeptide
EVQLVESGGGLVQPGGSLRLSCAASGRTFRRYTMGWFRQAPGKEREFVARIAGGSTYYADSVKGRFTISADNSKNTAYLQMNSLKPEDTAVYYCARQQYYDFWSGYFRSGYFDLWGQGTLVTVSS

SEQ ID NO: 3804 - protein, 126 aa, Artificial Sequence
  Description of Artificial Sequence: Synthetic polypeptide
EVQLVESGGGLVQPGGSLRLSCAASGHTFRNYGMGWFRQAPGKEREFVAAITSSGSTNYADSVKGRFTISADNSKNTAYLQMNSLKPEDTAVYYCATVPPPRRFLEWLPRRLTYTWGQGTLVTVSS

SEQ ID NO: 3805 - protein, 121 aa, Artificial Sequence
  Description of Artificial Sequence: Synthetic polypeptide
EVQLVESGGGLVQPGGSLRLSCAASGRTFSRYAMGWFRQAPGKEREFVASITKFGSTNYADSVKGRFTISADNSKNTAYLQMNSLKPEDTAVYYCAKERESRFLKWRKTDWGQGTLVTVSS

SEQ ID NO: 3806 - protein, 121 aa, Artificial Sequence
  Description of Artificial Sequence: Synthetic polypeptide
EVQLVESGGGLVQPGGSLRLSCAASGRNLRMYRMGWFRQAPGKEREFVASISRFGRTNYADSVKGRFTISADNSKNTAYLQMNSLKPEDTAVYYCARHDSIGLFRHGMDVWGQGTLVTVSS

SEQ ID NO: 3807 - protein, 124 aa, Artificial Sequence
  Description of Artificial Sequence: Synthetic polypeptide
EVQLVESGGGLVQPGGSLRLSCAASGRTFRRYAMGWFRQAPGKEREFVARISSGGSTSYADSVKGRFTISADNSKNTAYLQMNSLKPEDTAVYYCARDRGFGFWSGLRGYFDLWGQGTLVTVSS

SEQ ID NO: 3808 - protein, 123 aa, Artificial Sequence
  Description of Artificial Sequence: Synthetic polypeptide
EVQLVESGGGLVQPGGSLRLSCAASGIPASMYLGWFRQAPGKEREFVAAITSGGRTSYADSVKGRFTISADNSKNTAYLQMNSLKPEDTAVYYCAKRKKRGPLWFGGGGWGYWGQGTLVTVSS

SEQ ID NO: 3809 - protein, 121 aa, Artificial Sequence
  Description of Artificial Sequence: Synthetic polypeptide
EVQLVESGGGLVQPGGSLRLSCAASGIPFRSRTFSAYAMGWFRQAPGKEREFVAQITRGGSTNYADSVKGRFTISADNSKNTAYLQMNSLKPEDTAVYYCARRHWFGFDYWGQGTLVTVSS

SEQ ID NO: 3810 - protein, 119 aa, Artificial Sequence
  Description of Artificial Sequence: Synthetic polypeptide
QVQLVESGGGVVQPGRSLRLSCAASGFTFSSYAMHWVRQAPGKGLEWVAVISYDGNHEYYADSVKGRFTISRDNSKNTLYLQMNSLRAEDTAVYYCARGYKGYYYMDVWGQGTLVTVSS

SEQ ID NO: 3811 - protein, 118 aa, Artificial Sequence
  Description of Artificial Sequence: Synthetic polypeptide
QVQLVESGGGVVQPGRSLRLSCAASGFSFNNYGMHWVRQAPGKGLEWVAVISFDGSNEYYADSVKGRFTISRDNSKNTLYLQMNSLRAEDTAVYYCAKENWLGYFDPWGQGTLVTVSS

SEQ ID NO: 3812 - protein, 117 aa, Artificial Sequence
  Description of Artificial Sequence: Synthetic polypeptide
QVQLVESGGGVVQPGRSLRLSCAASGFTFGTYAMHWVRQAPGKGLEWVAVVSTEGGTTYYADSVKGRFTISRDNSKNTLYLQMNSLRAEDTAVYYCAGSYGAYFDYWGQGTLVTVSS

SEQ ID NO: 3813 - protein, 118 aa, Artificial Sequence
  Description of Artificial Sequence: Synthetic polypeptide
QVQLVESGGGVVQPGRSLRLSCAASGFDFSDYYMHWVRQAPGKGLEWVAVISYDGSNKYYADSVKGRFTISRDNSKNTLYLQMNSLRAEDTAVYYCAREEPVYGMDVWGQGTLVTVSS

SEQ ID NO: 3814 - protein, 117 aa, Artificial Sequence; identical to SEQ ID NO: 3812
  Description of Artificial Sequence: Synthetic polypeptide

SEQ ID NO: 3815 - protein, 121 aa, Artificial Sequence
  Description of Artificial Sequence: Synthetic polypeptide
QVQLVESGGGVVQPGRSLRLSCAASGFTFSGYAMHWVRQAPGKGLEWVAVISYDGSNEYYADSVKGRFTISRDNSKNTLYLQMNSLRAEDTAVYYCARTNSGSYYGPFDYWGQGTLVTVSS

SEQ ID NO: 3816 - protein, 119 aa, Artificial Sequence; identical to SEQ ID NO: 3810
  Description of Artificial Sequence: Synthetic polypeptide

SEQ ID NO: 3817 - protein, 119 aa, Artificial Sequence; identical to SEQ ID NO: 3810
  Description of Artificial Sequence: Synthetic polypeptide

SEQ ID NO: 3818 - protein, 121 aa, Artificial Sequence
  Description of Artificial Sequence: Synthetic polypeptide
QVQLVESGGGVVQPGRSLRLSCAASGFIFRSYAMHWVRQAPGKGLEWVAVISYDGSSKYYADSVKGRFTISRDNSKNTLYLQMNSLRAEDTAVYYCARPSSGSYFPPFDYWGQGTLVTVSS

SEQ ID NO: 3819 - protein, 118 aa, Artificial Sequence
  Description of Artificial Sequence: Synthetic polypeptide
QVQLVESGGGVVQPGRSLRLSCAASGFTFSDYGMHWVRQAPGKGLEWVAVVSYDGTTKYYADSVKGRFTISRDNSKNTLYLQMNSLRAEDTAVYYCAKENWLGYFDPWGQGTLVTVSS

SEQ ID NO: 3820 - protein, 117 aa, Artificial Sequence
  Description of Artificial Sequence: Synthetic polypeptide
QVQLVESGGGVVQPGRSLRLSCAASGFTFSNFPMHWVRQAPGKGLEWVAVISYDGSLKYYADSVKGRFTISRDNSKNTLYLQMNSLRAEDTAVYYCARYQGGYMDVWGQGTLVTVSS

SEQ ID NO: 3821 - protein, 117 aa, Artificial Sequence
  Description of Artificial Sequence: Synthetic polypeptide
QVQLVESGGGVVQPGRSLRLSCAASGFTFSRFAMHWVRQAPGKGLEWVAVISYDGSNKYYADSVKGRFTISRDNSKNTLYLQMNSLRAEDTAVYYCARDTGLGFDPWGQGTLVTVSS

SEQ ID NO: 3822 - protein, 121 aa, Artificial Sequence
  Description of Artificial Sequence: Synthetic polypeptide
QVQLVESGGGVVQPGRSLRLSCAASGFTFNNYAMHWVRQAPGKGLEWVAVISYDGNNKYYADSVKGRFTISRDNSKNTLYLQMNSLRAEDTAVYYCAKTMGGSYFDAFDIWGQGTLVTVSS

SEQ ID NO: 3823 - protein, 121 aa, Artificial Sequence
  Description of Artificial Sequence: Synthetic polypeptide
QVQLVESGGGVVQPGRSLRLSCAASGFTFSDYTMHWVRQAPGKGLEWVAVISYEGSIKYYADSVKGRFTISRDNSKNTLYLQMNSLRAEDTAVYYCARSSSGSYPSLVDYWGQGTLVTVSS

SEQ ID NO: 3824 - protein, 118 aa, Artificial Sequence
  Description of Artificial Sequence: Synthetic polypeptide
QVQLVESGGGVVQPGRSLRLSCAASGFSFSSYAMHWVRQAPGKGLEWVAVISFDGSNEYYADSVKGRFTISRDNSKNTLYLQMNSLRAEDTAVYYCARDYWVDYFKPGGRGALLTTSS

SEQ ID NO: 3825 - protein, 117 aa, Artificial Sequence
  Description of Artificial Sequence: Synthetic polypeptide
QVQLVESGGGVVQPGRSLRLSCAASGFTFSRYAMHWVRQAPGKGLEWVAVISYDGTNEYYADSVKGRFTISRDNSKNTLYLQMNSLRAEDTAVYYCARDTGLGFDPWGQGTLVTVSS

SEQ ID NO: 3826 - protein, 117 aa, Artificial Sequence; identical to SEQ ID NO: 3825
  Description of Artificial Sequence: Synthetic polypeptide

SEQ ID NO: 3827 - protein, 117 aa, Artificial Sequence; identical to SEQ ID NO: 3825
  Description of Artificial Sequence: Synthetic polypeptide

SEQ ID NO: 3828 - protein, 117 aa, Artificial Sequence; identical to SEQ ID NO: 3825
  Description of Artificial Sequence: Synthetic polypeptide

SEQ ID NO: 3829 - protein, 117 aa, Artificial Sequence; identical to SEQ ID NO: 3825
  Description of Artificial Sequence: Synthetic polypeptide

SEQ ID NO: 3830 - protein, 117 aa, Artificial Sequence; identical to SEQ ID NO: 3825
  Description of Artificial Sequence: Synthetic polypeptide

SEQ ID NO: 3831 - protein, 121 aa, Artificial Sequence
  Description of Artificial Sequence: Synthetic polypeptide
QVQLVESGGGVVQPGRSLRLSCAASGFTFGSYGMHWVRQAPGKGLEWVAVISYDGGDEYYADSVKGRFTISRDNSKNTLYLQMNSLRAEDTAVYYCARDISRYGYYGMDVWGQGTLVTVSS

SEQ ID NO: 3832 - protein, 117 aa, Artificial Sequence; identical to SEQ ID NO: 3812
  Description of Artificial Sequence: Synthetic polypeptide

SEQ ID NO: 3833 - protein, 121 aa, Artificial Sequence
  Description of Artificial Sequence: Synthetic polypeptide
QVQLVESGGGVVQPGRSLRLSCAASGFTFSNFAMHWVRQAPGKGLEWVAVISYDGNHEYYADSVKGRFTISRDNSKNTLYLQMNSLRAEDTAVYYCAKTNSGSYGGMFDYWGQGTLVTVSS

SEQ ID NO: 3834 - protein, 125 aa, Artificial Sequence
  Description of Artificial Sequence: Synthetic polypeptide
QVQLVESGGGVVQPGRSLRLSCAASGFTFDNYAMHWVRQAPGKGLEWVAVISDDGRNKYYADSVKGRFTISRDNSKNTLYLQMNSLRAEDTAVYYCAKDNYYDSSGYYGGGMDVWGQGTLVTVSS

SEQ ID NO: 3835 - protein, 121 aa, Artificial Sequence
  Description of Artificial Sequence: Synthetic polypeptide
QVQLVESGGGVVQPGRSLRLSCAASGFTFSSFAMHWVRQAPGKGLEWVAVISYDGSNKYYADSVKGRFTISRDNSKNTLYLQMNSLRAEDTAVYYCARSRSGSYSSYFDYWGQGTLVTVSS

SEQ ID NO: 3836 - protein, 121 aa, Artificial Sequence
  Description of Artificial Sequence: Synthetic polypeptide
QVQLVESGGGVVQPGRSLRLSCAASGFTFGTYAMHWVRQAPGKGLEWVAVVSTEGGTTYYADSVKGRFTISRDNSKNTLYLQMNSLRAEDTAVYYCAGEYYDSSGSSIDYWGQGTLVTVSS

SEQ ID NO: 3837 - protein, 121 aa, Artificial Sequence
  Description of Artificial Sequence: Synthetic polypeptide
QVQLVESGGGVVQPGRSLRLSCAASGFTFSSYAMHWVRQAPGKGLEWVAVISYDGSNQYYADSVKGRFTISRDNSKNTLYLQMNSLRAEDTAVYYCARAKGGGYRGAFDIWGQGTLVTVSS

SEQ ID NO: 3838 - protein, 121 aa, Artificial Sequence
  Description of Artificial Sequence: Synthetic polypeptide
QVQLVESGGGVVQPGRSLRLSCAASGFTFSSYAMHWVRQAPGKGLEWVAVISYDGSNTYYADSVKGRFTISRDNSKNTLYLQMNSLRAEDTAVYYCARPRGGSYWTYFDYWGQGTLVTVSS

SEQ ID NO: 3839 - protein, 117 aa, Artificial Sequence; identical to SEQ ID NO: 3812
  Description of Artificial Sequence: Synthetic polypeptide

SEQ ID NO: 3840 - protein, 124 aa, Artificial Sequence
  Description of Artificial Sequence: Synthetic polypeptide
QVQLVESGGGVVQPGRSLRLSCAASGFIFNNYGMHWVRQAPGKGLEWVAVISYDGSNIYYADSVKGRFTISRDNSKNTLYLQMNSLRAEDTAVYYCARDYNDGIGSYTGAFDSWGQGTLVTVSS

SEQ ID NO: 3841 - protein, 116 aa, Artificial Sequence
  Description of Artificial Sequence: Synthetic polypeptide
QVQLVESGGGVVQPGRSLRLSCAASGFTFDNYAMHWVRQAPGKGLEWVAVISYDGSNKYYADSVKGRFTISRDNSKNTLYLQMNSLRAEDTAVYYCLREGILWDVWGQGTLVTVSS

SEQ ID NO: 3842 - protein, 121 aa, Artificial Sequence
  Description of Artificial Sequence: Synthetic polypeptide
QVQLVESGGGVVQPGRSLRLSCAASGFTFSSQAMHWVRQAPGKGLEWVAVISYDGSNKYYADSVKGRFTISRDNSKNTLYLQMNSLRAEDTAVYYCAKTEGGTYGGAFDIWGQGTLVTVSS

SEQ ID NO: 3843 - protein, 125 aa, Artificial Sequence
  Description of Artificial Sequence: Synthetic polypeptide
QVQLVESGGGVVQPGRSLRLSCAASGFSFSSYGMHWVRQAPGKGLEWVAVISYDGSDKYYADSVKGRFTISRDNSKNTLYLQMNSLRAEDTAVYYCAKDNYYDSSGYYGGGMDVWGQGTLVTVSS

SEQ ID NO: 3844 - protein, 117 aa, Artificial Sequence
  Description of Artificial Sequence: Synthetic polypeptide
QVQLVESGGGVVQPGRSLRLSCAASGFTFSSYSMHWVRQAPGKGLEWVAVISYDGSHKYYADSVKGRFTISRDNSKNTLYLQMNSLRAEDTAVYYCARDGWGYFDYWGQGTLVTVSS

SEQ ID NO: 3845 - protein, 118 aa, Artificial Sequence
  Description of Artificial Sequence: Synthetic polypeptide
QVQLVESGGGVVQPGRSLRLSCAASGFIFSNYGMHWVRQAPGKGLEWVAVISYDGSDKYYADSVKGRFTISRDNSKNTLYLQMNSLRAEDTAVYYCARDDYMYGFEHWGQGTLVTVSS

SEQ ID NO: 3846 - protein, 118 aa, Artificial Sequence
  Description of Artificial Sequence: Synthetic polypeptide
QVQLVESGGGVVQPGRSLRLSCAASGFTFSDHYMHWVRQAPGKGLEWVAVISYDGSNEYYADSVKGRFTISRDNSKNTLYLQMNSLRAEDTAVYYCAKDLGPAGVDYWGQGTLVTVSS

SEQ ID NO: 3847 - protein, 121 aa, Artificial Sequence
  Description of Artificial Sequence: Synthetic polypeptide
QVQLVESGGGVVQPGRSLRLSCAASGFIFSSYAMHWVRQAPGKGLEWVAVISYDGSNKYYADSVKGRFTISRDNSKNTLYLQMNSLRAEDTAVYYCARSRSGSYSSWFDYWGQGTLVTVSS

SEQ ID NO: 3848 - protein, 121 aa, Artificial Sequence
  Description of Artificial Sequence: Synthetic polypeptide
QVQLVESGGGVVQPGRSLRLSCAASGFTFGTYAMHWVRQAPGKGLEWVAVISYDGNNKYYADSVKGRFTISRDNSKNTLYLQMNSLRAEDTAVYYCAKTGSGSYYSWFDYWGQGTLVTVSS

SEQ ID NO: 3849 - protein, 121 aa, Artificial Sequence
  Description of Artificial Sequence: Synthetic polypeptide
QVQLVESGGGVVQPGRSLRLSCAASGFTFSSYAMHWVRQAPGKGLEWVAVISYDGTNDYYADSVKGRFTISRDNSKNTLYLQMNSLRAEDTAVYYCARTRGGSYFTPFDYWGQGTLVTVSS

SEQ ID NO: 3850 - protein, 121 aa, Artificial Sequence
  Description of Artificial Sequence: Synthetic polypeptide
QVQLVESGGGVVQPGRSLRLSCAASGFTFDDYAMHWVRQAPGKGLEWVAVISYDGSNKYYADSVKGRFTISRDNSKNTLYLQMNSLRAEDTAVYYCASPHSGSYWAAFDIWGQGTLVTVSS

SEQ ID NO: 3851 - protein, 121 aa, Artificial Sequence
  Description of Artificial Sequence: Synthetic polypeptide
QVQLVESGGGVVQPGRSLRLSCAASGFTFSYYGMHWVRQAPGKGLEWVAVTSYDGSNKYYADSVKGRFTISRDNSKNTLYLQMNSLRAEDTAVYYCARPQGGSYFAAFDIWGQGTLVTVSS

SEQ ID NO: 3852 - protein, 121 aa, Artificial Sequence; identical to SEQ ID NO: 3818
  Description of Artificial Sequence: Synthetic polypeptide

SEQ ID NO: 3853 - protein, 121 aa, Artificial Sequence
  Description of Artificial Sequence: Synthetic polypeptide
QVQLVESGGGVVQPGRSLRLSCAASGFTFSSYAMHWVRQAPGKGLEWVAVISYDGSNQYYADSVKGRFTISRDNSKNTLYLQMNSLRAEDTAVYYCAKTRTGSYFSAFDIWGQGTLVTVSS

SEQ ID NO: 3854 - protein, 121 aa, Artificial Sequence
  Description of Artificial Sequence: Synthetic polypeptide
QVQLVESGGGVVQPGRSLRLSCAASGFTFSYYGMHWVRQAPGKGLEWVAVISYDGTNDYYADSVKGRFTISRDNSKNTLYLQMNSLRAEDTAVYYCAKPHSGSYRGYFDYWGQGTLVTVSS

SEQ ID NO: 3855 - protein, 121 aa, Artificial Sequence
  Description of Artificial Sequence: Synthetic polypeptide
QVQLVESGGGVVQPGRSLRLSCAASGFTFSYYGMHWVRQAPGKGLEWVAVTSYDGSNKYYSDSVKGRFTISRDNSKNTLYLQMNSLRAEDTAVYYCARPKSGSYATYFDYWGQGTLVTVSS

SEQ ID NO: 3856 - protein, 121 aa, Artificial Sequence
  Description of Artificial Sequence: Synthetic polypeptide
QVQLVESGGGVVQPGRSLRLSCAASGFIFRNYAMHWVRQAPGKGLEWVAVISYDGSNKYYADSVKGRFTISRDNSKNTLYLQMNSLRAEDTAVYYCARPRGGSYHGAFDIWGQGTLVTVSS

SEQ ID NO: 3857 - protein, 121 aa, Artificial Sequence
  Description of Artificial Sequence: Synthetic polypeptide
QVQLVESGGGVVQPGRSLRLSCAASGFTFSIYAMHWVRQAPGKGLEWVAVISYDGTNEYYADSVKGRFTISRDNSKNTLYLQMNSLRAEDTAVYYCAKSRGGSYYGAFDYWGQGTLVTVSS

SEQ ID NO: 3858 - protein, 121 aa, Artificial Sequence
  Description of Artificial Sequence: Synthetic polypeptide
QVQLVESGGGVVQPGRSLRLSCAASGFTFNNYVMHWVRQAPGKGLEWVAVISYDGTNDYYADSVKGRFTISRDNSKNTLYLQMNSLRAEDTAVYYCARGESGSYWGAFDYWGQGTLVTVSS

SEQ ID NO: 3859 - protein, 121 aa, Artificial Sequence
  Description of Artificial Sequence: Synthetic polypeptide
QVQLVESGGGVVQPGRSLRLSCAASGFTFSSYGMHWVRQAPGKGLEWVAVISYDGTTEYYADSVKGRFTISRDNSKNTLYLQMNSLRAEDTAVYYCARPSSGSYLGFFDYWGQGTLVTVSS

SEQ ID NO: 3860 - protein, 121 aa, Artificial Sequence
  Description of Artificial Sequence: Synthetic polypeptide
QVQLVESGGGVVQPGRSLRLSCAASGFIFRSYAMHWVRQAPGKGLEWVAVISYDGSIKYYADSVKGRFTISRDNSKNTLYLQMNSLRAEDTAVYYCARTRGGSYYGAFDYWGQGTLVTVSS

SEQ ID NO: 3861 - protein, 121 aa, Artificial Sequence
  Description of Artificial Sequence: Synthetic polypeptide
QVQLVESGGGVVQPGRSLRLSCAASGFSFGGYGMHWVRQAPGKGLEWVAVISYDGSNEYYADSVKGRFTISRDNSKNTLYLQMNSLRAEDTAVYYCAKSYSGSYSSYFDYWGQGTLVTVSS

SEQ ID NO: 3862 - protein, 121 aa, Artificial Sequence
  Description of Artificial Sequence: Synthetic polypeptide
QVQLVESGGGVVQPGRSLRLSCAASGFAFSSHAMHWVRQAPGKGLEWVAVISYDGSNKYYADSEKGRFTISRDNSKNTLYLQMNSLRAEDTAVYYCAKAYSGSYMGYFDYWGQGTLVTVSS

SEQ ID NO: 3863 - protein, 121 aa, Artificial Sequence
  Description of Artificial Sequence: Synthetic polypeptide
QVQLVESGGGVVQPGRSLRLSCAASGFSFSTYGMHWVRQAPGKGLEWVAVISYDGSNKYYADSVKGRFTISRDNSKNTLYLQMNSLRAEDTAVYYCARPLSGSYWSWFDPWGQGTLVTVSS

SEQ ID NO: 3864 - protein, 121 aa, Artificial Sequence
  Description of Artificial Sequence: Synthetic polypeptide
QVQLVESGGGVVQPGRSLRLSCAASGFTFSSYSMHWVRQAPGKGLEWVAVISYDGSNKYYADSVKGRFTISRDNSKNTLYLQMNSLRAEDTAVYYCARGKGGGYYSSFDFWGQGTLVTVSS

SEQ ID NO: 3865 - protein, 121 aa, Artificial Sequence
  Description of Artificial Sequence: Synthetic polypeptide
QVQLVESGGGVVQPGRSLRLSCAASGFSFGGYGMHWVRQAPGKGLEWVAVISYDGSNKYYADSVKGRFTISRDNSKNTLYLQMNSLRAEDTAVYYCARPYSGSYISWFDYWGQGTLVTVSS

SEQ ID NO: 3866 - protein, 121 aa, Artificial Sequence
  Description of Artificial Sequence: Synthetic polypeptide
QVQLVESGGGVVQPGRSLRLSCAASGFIFRSYAMHWVRQAPGKGLEWVAVISYDGSSKYYADSVKGRFTISRDNSKNTLYLQMNSLRAEDTAVYYCARTLGGSYFAAFDIWGQGTLVTVSS

SEQ ID NO: 3867 - protein, 121 aa, Artificial Sequence
  Description of Artificial Sequence: Synthetic polypeptide
QVQLVESGGGVVQPGRSLRLSCAASGFTFGSYGMHWVRQAPGKGLEWVAVISYDGNHEYYADSVKGRFTISRDNSKNTLYLQMNSLRAEDTAVYYCARPHSGSYTAYFDYWGQGTLVTVSS

SEQ ID NO: 3868 - protein, 120 aa, Artificial Sequence
  Description of Artificial Sequence: Synthetic polypeptide
QVQLVESGGGVVQPGRSLRLSCAASGFTFSSYAMHWVRQAPGKGLEWVAVISYDGSNQYYADSVKGRFTISRDNSKNTLYLQMNSLRAEDTAVYYCARGYGGSYSYFDYWGQGTLVTVSS

SEQ ID NO: 3869 - protein, 121 aa, Artificial Sequence
  Description of Artificial Sequence: Synthetic polypeptide
QVQLVESGGGVVQPGRSLRLSCAASGFAFSSYAMHWVRQAPGKGLEWVAVISYDGTYEYYADSVKGRFTISRDNSKNTLYLQMNSLRAEDTAVYYCARSLGGSYFSGMDVWGQGTLVTVSS

SEQ ID NO: 3870 - protein, 121 aa, Artificial Sequence
  Description of Artificial Sequence: Synthetic polypeptide
QVQLVESGGGVVQPGRSLRLSCAASGFSFGGYGMHWVRQAPGKGLEWVAVISYDGSNKYYADSVKGRFTISRDNSKNTLYLQMNSLRAEDTAVYYCARSKGGSYYGPFDYWGQGTLVTVSS

SEQ ID NO: 3871 - protein, 121 aa, Artificial Sequence
  Description of Artificial Sequence: Synthetic polypeptide
QVQLVESGGGVVQPGRSLRLSCAASGFSFGGYGMHWVRQAPGKGLEWVAVISYDGSNKYYADSVKGRFTISRDNSKNTLYLQMNSLRAEDTAVYYCARPKGGNYWNAFDIWGQGTLVTVSS

SEQ ID NO: 3872 - protein, 121 aa, Artificial Sequence
  Description of Artificial Sequence: Synthetic polypeptide
QVQLVESGGGVVQPGRSLRLSCAASGFTFSSYGMHWVRQAPGKGLEWVAVISYDGNHEYYADSVKGRFTISRDNSKNTLYLQMNSLRAEDTAVYYCARPKSGSYVSYFDYWGQGTLVTVSS

SEQ ID NO: 3873 - protein, 121 aa, Artificial Sequence
  Description of Artificial Sequence: Synthetic polypeptide
QVQLVESGGGVVQPGRSLRLSCAASGFIFSSYAMHWVRQAPGKGLEWVAVISYDGSNKYYADSVKGRFTISRDNSKNTLYLQMNSLRAEDTAVYYCARPRGGNYLNYFDYWGQGTLVTVSS

SEQ ID NO: 3874 - protein, 118 aa, Artificial Sequence
  Description of Artificial Sequence: Synthetic polypeptide
QVQLVESGGGVVQPGRSLRLSCAASGFTFSNFPMHWVRQAPGKGLEWVAVISYDGNNKYYADSVKGRFTISRDNSKNTLYLQMNSLRAEDTAVYYCAKDHGDHYFDYWGQGTLVTVSS

SEQ ID NO: 3875 - protein, 121 aa, Artificial Sequence
  Description of Artificial Sequence: Synthetic polypeptide
QVQLVESGGGVVQPGRSLRLSCAASGFTFSSYAMHWVRQAPGKGLEWVAVISYDGSNQYYADSVKGRFTISRDNSKNTLYLQMNSLRAEDTAVYYCARDKGGSYYGPFDYWGQGTLVTVSS

SEQ ID NO: 3876 - protein, 121 aa, Artificial Sequence
  Description of Artificial Sequence: Synthetic polypeptide
QVQLVESGGGVVQPGRSLRLSCAASGFTFSNYAMHWVRQAPGKGLEWVAVISYDGSNEYYADSEKGRFTISRDNSKNTLYLQMNSLRAEDTAVYYCAKSGSGSYFSPFDYWGQGTLVTVSS

SEQ ID NO: 3877 - protein, 121 aa, Artificial Sequence
  Description of Artificial Sequence: Synthetic polypeptide
QVQLVESGGGVVQPGRSLRLSCAASGFSFGGYGMHWVRQAPGKGLEWVAVISYDGSTKYYADSVKGRFTISRDNSKNTLYLQMNSLRAEDTAVYYCARPRGGSYKDAFDIWGQGTLVTVSS

SEQ ID NO: 3878 - protein, 121 aa, Artificial Sequence
  Description of Artificial Sequence: Synthetic polypeptide
QVQLVESGGGVVQPGRSLRLSCAASGFTFSSYAMHWVRQAPGKGLEWVAVISYDGTNEYYADSEKGRFTISRDNSKNTLYLQMNSLRAEDTAVYYCARAHGGSYFSGMDVWGQGTLVTVSS

SEQ ID NO: 3879 - protein, 121 aa, Artificial Sequence
  Description of Artificial Sequence: Synthetic polypeptide
QVQLVESGGGVVQPGRSLRLSCAASGFSFSNYGMHWVRQAPGKGLEWVAVISYDGNNKYYADSVKGRFTISRDNSKNTLYLQMNSLRAEDTAVYYCARSKGGSYYGPFDDWGQGTLVTVSS

SEQ ID NO: 3880 - protein, 121 aa, Artificial Sequence
  Description of Artificial Sequence: Synthetic polypeptide
QVQLVESGGGVVQPGRSLRLSCAASGFTFSGYAMHWVRQAPGKGLEWVAVISYDGSNKYYADSVKGRFTISRDNSKNTLYLQMNSLRAEDTAVYYCARSRGGSYYAPFDYWGQGTLVTVSS

SEQ ID NO: 3881 - protein, 121 aa, Artificial Sequence
  Description of Artificial Sequence: Synthetic polypeptide
QVQLVESGGGVVQPGRSLRLSCAASGFTFSYYTMHWVRQAPGKGLEWVAVTSYDGSNKYYADSVKGRFTISRDNSKNTLYLQMNSLRAEDTAVYYCARPLGGSYFAAFDIWGQGTLVTVSS

SEQ ID NO: 3882 - protein, 121 aa, Artificial Sequence
  Description of Artificial Sequence: Synthetic polypeptide
QVQLVESGGGVVQPGRSLRLSCAASGFTFGTYAMHWVRQAPGKGLEWVAVISYDGNNKYYADSVKGRFTISRDNSKNTLYLQMNSLRAEDTAVYYCAKTMSGSYFSAFDIWGQGTLVTVSS

SEQ ID NO: 3883 - protein, 121 aa, Artificial Sequence
  Description of Artificial Sequence: Synthetic polypeptide
QVQLVESGGGVVQPGRSLRLSCAASGFTFSSYAMHWVRQAPGKGLEWVAVISYDGSNQYYADSVKGRFTISRDNSKNTLYLQMNSLRAEDTAVYYCARPHGGNYFDWFDPWGQGTLVTVSS

SEQ ID NO: 3884 - protein, 121 aa, Artificial Sequence
  Description of Artificial Sequence: Synthetic polypeptide
QVQLVESGGGVVQPGRSLRLSCAASGFIFRSYAMHWVRQAPGKGLEWVAVISYDGSSKYYADSVKGRFTISRDNSKNTLYLQMNSLRAEDTAVYYCARPSGGSYFDPFDYWGQGTLVTVSS

SEQ ID NO: 3885 - protein, 121 aa, Artificial Sequence
  Description of Artificial Sequence: Synthetic polypeptide
QVQLVESGGGVVQPGRSLRLSCAASGFTFSSSSMHWVRQAPGKGLEWVAVISYDGSNKYYADSVKGRFTISRDNSKNTLYLQMNSLRAEDTAVYYCAKVDSGSYVGYFDYWGQGTLVTVSS

SEQ ID NO: 3886 - protein, 121 aa, Artificial Sequence
  Description of Artificial Sequence: Synthetic polypeptide
QVQLVESGGGVVQPGRSLRLSCAASGFSFNNYGMHWVRQAPGKGLEWVAVISYDGSNDYYADSVKGRFTISRDNSKNTLYLQMNSLRAEDTAVYYCARPNSGSYSNYFDYWGQGTLVTVSS

SEQ ID NO: 3887 - protein, 121 aa, Artificial Sequence
  Description of Artificial Sequence: Synthetic polypeptide
QVQLVESGGGVVQPGRSLRFSCAGTGFTFSSYAMHWVRQAPGKGLEWVAVISYDGSNQYYADSVKGRFTISRDNSKNTLYLQMNSLRAEDTAVYYCARSRSGSYLAYFDYWGQGTLVTVSS

SEQ ID NO: 3888 - protein, 121 aa, Artificial Sequence
  Description of Artificial Sequence: Synthetic polypeptide
QVQLVESGGGVVQPGRSLRLSCAASGFTFSSYAMHWVRQAPGKGLEWVAVISYDGSNQYYADSVKGRFTISRDNSKNTLYLQMNSLRAEDTAVYYCARAAGGSYSSWFDPWGQGTLVTVSS

SEQ ID NO: 3889 - protein, 121 aa, Artificial Sequence
  Description of Artificial Sequence: Synthetic polypeptide
QVQLVESGGGVVQPGRSLRLSCAASGFTFSSYAMHWVRQAPGKGLEWVAVISYDGNHEYYADSVKGRFTISRDNSKNTLYLQMNSLRAEDTAVYYCARAHSGSYFSHFDYWGQGTLVTVSS

SEQ ID NO: 3890 - protein, 121 aa, Artificial Sequence
  Description of Artificial Sequence: Synthetic polypeptide
QVQLVESGGGVVQPGRSLRLSCAASGFTFSSYAMHWVRQAPGKGLEWVAVISYDGSNTYYADSVKGRFTISRDNSKNTLYLQMNSLRAEDTAVYYCARPTSGSYFSWFDPWGQGTLVTVSS

SEQ ID NO: 3891 - protein, 121 aa, Artificial Sequence
  Description of Artificial Sequence: Synthetic polypeptide
QVQLVESGGGVVQPGRSLRLSCAASGFIFSSYAMHWVRQAPGKGLEWVAVISYDGSNKYYADSVKGRFTISRDNSKNTLYLQMNSLRAEDTAVYYCARPNSGSYWGPFDYWGQGTLVTVSS

SEQ ID NO: 3892 - protein, 120 aa, Artificial Sequence
  Description of Artificial Sequence: Synthetic polypeptide
QVQLVESGGGVVQPGRSLRLSCAASGFTFGSYGMHWVRQAPGKGLEWVAVISYDGSHKYYADSVKGRFTISRDNSKNTLYLQMNSLRAEDTAVYYCARALGGNYYYFDYWGQGTLVTVSS

SEQ ID NO: 3893 - protein, 121 aa, Artificial Sequence
  Description of Artificial Sequence: Synthetic polypeptide
QVQLVESGGGVVQPGRSLRLSCAASGFIFSSYGMHWVRQAPGKGLEWVAVISYDGSNEYYADSVKGRFTISRDNSKNTLYLQMNSLRAEDTAVYYCARPRSGSYLSAFDYWGQGTLVTVSS

SEQ ID NO: 3894 - protein, 120 aa, Artificial Sequence
  Description of Artificial Sequence: Synthetic polypeptide
QVQLVESGGGVVQPGRSLRLSCAASGFTFSSYSMHWVRQAPGKGLEWVAVISYDGRNQYYADSVKGRFTISRDNSKNTLYLQMNSLRAEDTAVYYCAKGYGGNYYYMDGWGQGTLVTVSS

SEQ ID NO: 3895 - protein, 121 aa, Artificial Sequence
  Description of Artificial Sequence: Synthetic polypeptide
QVQLVESGGGVVQPGRSLRLSCAASGFTFSSYAMHWVRQAPGKGLEWVAVISYDGNNKYYADSVKGRFTISRDNSKNTLYLQMNSLRAEDTAVYYCARTYGGSYYSAFDYWGQGTLVTVSS

SEQ ID NO: 3896 - protein, 119 aa, Artificial Sequence
  Description of Artificial Sequence: Synthetic polypeptide
QVQLVESGGGVVQPGRSLRLSCAASGFSFNNHAMHWVRQAPGKGLEWVAVISYDGSDKYYADSVKGRFTISRDNSKNTLYLQMNSLRAEDTAVYYCARNLLRGYGMDVWGQGTLVTVSS

SEQ ID NO: 3897 - protein, 118 aa, Artificial Sequence
  Description of Artificial Sequence: Synthetic polypeptide
QVQLVESGGGVVQPGRSLRLSCAASGFAFDDYAMHWVRQAPGKGLEWVAVISYDGSNKYYADSVKGRFTISRDNSKNTLYLQMNSLRAEDTAVYYCATLGYGDYPDYWGQGTLVTVSS

SEQ ID NO: 3898 - protein, 121 aa, Artificial Sequence
  Description of Artificial Sequence: Synthetic polypeptide
QVQLVESGGGVVQPGRSLRLSCAASGFIFRSYAMHWVRQAPGKGLEWVAVISYDGSSKYYADSVKGRFTISRDNSKNTLYLQMNSLRAEDTAVYYCARPLGGGYQDAFDIWGQGTLVTVSS

SEQ ID NO: 3899 - protein, 117 aa, Artificial Sequence
  Description of Artificial Sequence: Synthetic polypeptide
EVQLVESGGGLVQPGGSLRLSCAASGGTFSSIGMGWFRQAPGKEREFVAAISWDGGATAYADSVKGRFTISADNSKNTAYLQMNSLKPEDTAVYYCAKEDVGKPFYWGQGTLVTVSS

SEQ ID NO: 3900 - protein, 117 aa, Artificial Sequence
  Description of Artificial Sequence: Synthetic polypeptide
EVQLVESGGGLVQPGGSLRLSCAASGGTFSSIGMGWFRQAPGKEREFVAAISWDGGATAYADSVKGRFTISADNSKNTAYLQMNSLKPEDTAVYYCAKEDVGKPFFWGQGTLVTVSS

SEQ ID NO: 3901 - protein, 117 aa, Artificial Sequence
  Description of Artificial Sequence: Synthetic polypeptide
EVQLVESGGGLVQPGGSLRLSCAASGGTFSSIGMGWFRQAPGKEREFVAAISWDGGSTAYADSVKGRFTISADNSKNTAYLQMNSLKPEDTAVYYCAKEDVGKPFDWGQGTLVTVSS

SEQ ID NO: 3902 - protein, 117 aa, Artificial Sequence
  Description of Artificial Sequence: Synthetic polypeptide
EVQLVESGGGLVQPGGSLRLSCAASGGTFSSIGMGWFRQAPGKEREFVAAISWDGGATAYADSVKGRFTISADNSKNTAYLQMNSLKPEDTAVYYCAKEDVGKPFCWGQGTLVTVSS

SEQ ID NO: 3903 - protein, 117 aa, Artificial Sequence
  Description of Artificial Sequence: Synthetic polypeptide
EVQLVESGGGLVQPGGSLRLSCAASGGTFSSIGMGWFRQAPGKEREFVAAISWNGGATAYADSVKGRFTISADNSKNTAYLQMNSLKPEDTAVYYCAKEDVGKPFDWGQGTLVTVSS

SEQ ID NO: 3904 - protein, 117 aa, Artificial Sequence
  Description of Artificial Sequence: Synthetic polypeptide
EVQLVESGGGLVQPGGSLRLSCAASGGTFSSIGMGWFRQAPGKEREFVAAISWDGGRTAYADSVKGRFTISADNSKNTAYLQMNSLKPEDTAVYYCAKEDVGKPFDWGQGTLVTVSS

SEQ ID NO: 3905 - protein, 117 aa, Artificial Sequence
  Description of Artificial Sequence: Synthetic polypeptide
EVQLVESGGGLVQPGGSLRLSCAASGGTFSSIGMGWFRQAPGKEREFVAAISWSGGATAYADSVKGRFTISADNSKNTAYLQMNSLKPEDTAVYYCAKEDVGKPFDWGQGTLVTVSS

SEQ ID NO: 3906 - protein, 117 aa, Artificial Sequence
  Description of Artificial Sequence: Synthetic polypeptide
EVQLVESGGGLVQPGGSLRLSCAASGGTFSSIGMGWFRQAPGKEREFVAAISWDGGATAYADSVKGRFTISADNSKNTAYLQMNSLKPEDTAVYYCAKEDVGKPLDWGQGTLVTVSS

SEQ ID NO: 3907 - protein, 117 aa, Artificial Sequence
  Description of Artificial Sequence: Synthetic polypeptide
EVQLVESGGGLVQPGGSLRLSCAASGGTFSSIGMGWFRQAPGKEREFVAAISWDGGATAYADSVKGRFTISADNSKNTAYLQMNSLKPEDTAVYYCAKEDVGPPFDWGQGTLVTVSS

SEQ ID NO: 3908 - protein, 117 aa, Artificial Sequence
  Description of Artificial Sequence: Synthetic polypeptide
EVQLVESGGGLVQPGGSLRLSCAASGGTFSSIGMGWFRQAPGKEREFVAAISWDGGATAYADSVKGRFTISADNSKNTAYLQMNSLKPEDTAVYYCAKEDVGKPFHWGQGTLVTVSS

SEQ ID NO: 3909 - protein, 117 aa, Artificial Sequence
  Description of Artificial Sequence: Synthetic polypeptide
EVQLVESGGGLVQPGGSLRLSCAASGGTFSSIGMGWFRQAPGKEREFVAAISWDGGATAYADSVKGRFTISADNSKNTAYLQMNSLKPEDTAVYYCAKEDVGPPFYWGQGTLVTVSS

SEQ ID NO: 3910 - protein, 117 aa, Artificial Sequence
  Description of Artificial Sequence: Synthetic polypeptide
EVQLVESGGGLVQPGGSLRLSCAASGGTFSSIGMGWFRQAPGKEREFVAAISWDGGATAYADSVKGRFTISADNSKNTAYLQMNSLKPEDTAVYYCWKEDVGKPGDWGQGTLVTVSS

SEQ ID NO: 3911 - protein, 117 aa, Artificial Sequence
  Description of Artificial Sequence: Synthetic polypeptide
EVQLVESGGGLVQPGGSLRLSCAASGGTFSSIGMGWFRQAPGKEREFVAAISWDRGATAYADSVKGRFTISADNSKNTAYLQMNSLKPEDTAVYYCAKEDVGKPFCWGQGTLVTVSS

SEQ ID NO: 3912 - protein, 117 aa, Artificial Sequence
  Description of Artificial Sequence: Synthetic polypeptide
EVQLVESGGGLVQPGGSLRLSCAASGGTFSSIGMGWFRQAPGKEREFVAAISWDGGATAYADSVKGRFTISADNSKNTAYLQMNSLKPEDTAVYYCRKEDVGKPFFWGQGTLVTVSS

SEQ ID NO: 3913 - protein, 117 aa, Artificial Sequence
  Description of Artificial Sequence: Synthetic polypeptide
EVQLVESGGGLVQPGGSLRLSCAASGGTFSSIGMGWFRQAPGKEREFVAAISWDGGATAYADSVKGRFTISADNSKNTAYLQMNSLKPEDTAVYYCYKEDVGKPFYWGQGTLVTVSS

SEQ ID NO: 3914 - protein, 117 aa, Artificial Sequence
  Description of Artificial Sequence: Synthetic polypeptide
EVQLVESGGGLVQPGGSLRLSCAASGGTFSSIGMGWFRQAPGKEREFVAAISWDGGATAYADSVKGRFTISADNSKNTAYLQMNSLKPEDTAVYYCHKEDVGKPFYWGQGTLVTVSS

SEQ ID NO: 3915 - protein, 117 aa, Artificial Sequence
  Description of Artificial Sequence: Synthetic polypeptide
EVQLVESGGGLVQPGGSLRLSCAASGGTFSSIGMGWFRQAPGKEREFVAAISWDGGATAYADSVKGRFTISADNSKNTAYLQMNSLKPEDTAVYYCFKEDVGKPFFWGQGTLVTVSS

SEQ ID NO: 3916 - protein, 117 aa, Artificial Sequence
  Description of Artificial Sequence: Synthetic polypeptide
EVQLVESGGGLVQPGGSLRLSCAASGGTFSSIGMGWFRQAPGKEREFVAAISWDGGATAYADSVKGRFTISADNSKNTAYLQMNSLKPEDTAVYYCYKEDVGKPFFWGQGTLVTVSS

SEQ ID NO: 3917 - protein, 117 aa, Artificial Sequence
  Description of Artificial Sequence: Synthetic polypeptide
EVQLVESGGGLVQPGGSLRLSCAASGGTFSSIGMGWFRQAPGKEREFVAAISWDGGATAYADSVKGRFTISADNSKNTAYLQMNSLKPEDTAVYYCFKEDVGKPFWWGQGTLVTVSS

SEQ ID NO: 3918 - protein, 117 aa, Artificial Sequence
  Description of Artificial Sequence: Synthetic polypeptide
EVQLVESGGGLVQPGGSLRLSCAASGGTFSSIGMGWFRQAPGKEREFVAAISWDGGATAYADSVKGRFTISADNSKNTAYLQMNSLKPEDTAVYYCWKEDVGKPFDEGQGTLVTVSS

SEQ ID NO: 3919 - protein, 115 aa, Artificial Sequence
  Description of Artificial Sequence: Synthetic polypeptide
EVQLVESGGGLVQPGGSLRLSCAASGFTFSGSWMGWFRQAPGKEREFVATINEYGGRNYADSVKGRFTISADNSKNTAYLQMNSLKPEDTAVYYCARVDRDFDYWGQGTLVTVSS

SEQ ID NO: 3920 - protein, 115 aa, Artificial Sequence
  Description of Artificial Sequence: Synthetic polypeptide
EVQLVESGGGLVQPGGSLRLSCAASGFWFSPSWMGWFRQAPGKEREFVATINEYGGRNYADSVKGRFTISADNSKNTAYLQMNSLKPEDTAVYYCARVDRDFDYWGQGTLVTVSS

SEQ ID NO: 3921 - protein, 115 aa, Artificial Sequence
  Description of Artificial Sequence: Synthetic polypeptide
EVQLVESGGGLVQPGGSLRLSCAASGFTFSPSWMGWFRQAPGKEREFVATINEYGGRNYADSVKGRFTISADNSKNTAYLQMNSLKPEDTAVYYCARVTRDFDYWGQGTLVTVSS

SEQ ID NO: 3922 - protein, 115 aa, Artificial Sequence
  Description of Artificial Sequence: Synthetic polypeptide
EVQLVESGGGLVQPGGSLRLSCAASGFTFSPSWMGWFRQAPGKEREFVATINEYGGRNYADSVKGRFTISADNSKNTAYLQMNSLKPEDTAVYYCARVWRDFDYWGQGTLVTVSS

SEQ ID NO: 3923 - protein, 115 aa, Artificial Sequence
  Description of Artificial Sequence: Synthetic polypeptide
EVQLVESGGGLVQPGGSLRLSCAASGFTFSPSWMGWFRQAPGKEREFVATINSYGGRNYADSVKGRFTISADNSKNTAYLQMNSLKPEDTAVYYCARVDRDFDYWGQGTLVTVSS

SEQ ID NO: 3924 - protein, 115 aa, Artificial Sequence
  Description of Artificial Sequence: Synthetic polypeptide
EVQLVESGGGLVQPGGSLRLSCAASGFTFSPSWMGWFRQAPGKEREFVAFINEYGGRNYADSVKGRFTISADNSKNTAYLQMNSLKPEDTAVYYCARVDRDFDYWGQGTLVTVSS

SEQ ID NO: 3925 - protein, 115 aa, Artificial Sequence
  Description of Artificial Sequence: Synthetic polypeptide
EVQLVESGGGLVQPGGSLRLSCAASGFTFSPSWMGWFRQAPGKEREFVATINPYGGRNYADSVKGRFTISADNSKNTAYLQMNSLKPEDTAVYYCARVDRDFDYWGQGTLVTVSS

SEQ ID NO: 3926 - protein, 115 aa, Artificial Sequence
  Description of Artificial Sequence: Synthetic polypeptide
EVQLVESGGGLVQPGGSLRLSCAASGTTFSPSWMGWFRQAPGKEREFVATINEYGGRNYADSVKGRFTISADNSKNTAYLQMNSLKPEDTAVYYCARVDRDFDYWGQGTLVTVSS

SEQ ID NO: 3927 - protein, 115 aa, Artificial Sequence
  Description of Artificial Sequence: Synthetic polypeptide
EVQLVESGGGLVQPGGSLRLSCAASGFTFSPSWFGWFRQAPGKEREFVATINEYGGRNYADSVKGRFTISADNSKNTAYLQMNSLKPEDTAVYYCARVDRDFDYWGQGTLVTVSS

SEQ ID NO: 3928 - protein, 115 aa, Artificial Sequence
  Description of Artificial Sequence: Synthetic polypeptide
EVQLVESGGGLVQPGGSLRLSCAASGFTFSPSWMGWFRQAPGKEREFVATINEYGGRNYADSVKGRFTISADNSKNTAYLQMNSLKPEDTAVYYCARVYRDFDYWGQGTLVTVSS

SEQ ID NO: 3929 - protein, 115 aa, Artificial Sequence
  Description of Artificial Sequence: Synthetic polypeptide
EVQLVESGGGLVQPGGSLRLSCAASGFTFSPSWMGWFRQAPGKEREFVAWINPYGGRNYADSVKGRFTISADNSKNTAYLQMNSLKPEDTAVYYCARVDRDFDYWGQGTLVTVSS

SEQ ID NO: 3930 - protein, 115 aa, Artificial Sequence
  Description of Artificial Sequence: Synthetic polypeptide
EVQLVESGGGLVQPGGSLRLSCAASGFWFSPSWMGWFRQAPGKEREFVATINEYGGRNYADSVKGRFTISADNSKNTAYLQMNSLKPEDTAVYYCARVTRDFDYWGQGTLVTVSS

SEQ ID NO: 3931 - protein, 115 aa, Artificial Sequence
  Description of Artificial Sequence: Synthetic polypeptide
EVQLVESGGGLVQPGGSLRLSCAASGFFFYPSWMGWFRQAPGKEREFVATINEYGGRNYADSVKGRFTISADNSKNTAYLQMNSLKPEDTAVYYCARVDRDFDYWGQGTLVTVSS

SEQ ID NO: 3932 - protein, 115 aa, Artificial Sequence
  Description of Artificial Sequence: Synthetic polypeptide
EVQLVESGGGLVQPGGSLRLSCAASGFFFHPSWMGWFRQAPGKEREFVATINEYGGRNYADSVKGRFTISADNSKNTAYLQMNSLKPEDTAVYYCARVDRDFDYWGQGTLVTVSS

SEQ ID NO: 3933 - protein, 115 aa, Artificial Sequence
  Description of Artificial Sequence: Synthetic polypeptide
EVQLVESGGGLVQPGGSLRLSCAASGFWFSPSWMGWFRQAPGKEREFVATINEYGGRNYADSVKGRFTISADNSKNTAYLQMNSLKPEDTAVYYCARVSRDFDYWGQGTLVTVSS

SEQ ID NO: 3934 - protein, 115 aa, Artificial Sequence
  Description of Artificial Sequence: Synthetic polypeptide
EVQLVESGGGLVQPGGSLRLSCAASGFWFSPSWMGWFRQAPGKEREFVATINEYGGRNYADSVKGRFTISADNSKNTAYLQMNSLKPEDTAVYYCARVDGDFDYWGQGTLVTVSS

SEQ ID NO: 3935 - protein, 115 aa, Artificial Sequence
  Description of Artificial Sequence: Synthetic polypeptide
EVQLVESGGGLVQPGGSLRLSCAASGFWFSPSWMGWFRQAPGKEREFVATINNYGGRNYADSVKGRFTISADNSKNTAYLQMNSLKPEDTAVYYCARVDRDFDYWGQGTLVTVSS

SEQ ID NO: 3936 - protein, 115 aa, Artificial Sequence
  Description of Artificial Sequence: Synthetic polypeptide
EVQLVESGGGLVQPGGSLRLSCAASGFCFSPSWMGWFRQAPGKEREFVATINEYGGRNYADSVKGRFTISADNSKNTAYLQMNSLKPEDTAVYYCARVTRDFDYWGQGTLVTVSS

SEQ ID NO: 3937 - protein, 115 aa, Artificial Sequence
  Description of Artificial Sequence: Synthetic polypeptide
EVQLVESGGGLVQPGGSLRLSCAASGWFFSPSWMGWFRQAPGKEREFVATINEYGGRNYADSVKGRFTISADNSKNTAYLQMNSLKPEDTAVYYCARVDRDFDYWGQGTLVTVSS

SEQ ID NO: 3938 - protein, 115 aa, Artificial Sequence
  Description of Artificial Sequence: Synthetic polypeptide
EVQLVESGGGLVQPGGSLRLSCAASGFWFSPSWMGWFRQAPGKEREFVATINEYGGRNYADSVKGRFTISADNSKNTAYLQMNSLKPEDTAVYYCARVYRDFDYWGQGTLVTVSS

SEQ ID NO: 3939 - protein, 115 aa, Artificial Sequence
  Description of Artificial Sequence: Synthetic polypeptide
EVQLVESGGGLVQPGGSLRLSCAASGFTFSPSWMGWFRQAPGKEREFVSTINEYGGRNYADSVKGRFTISADNSKNTAYLQMNSLKPEDTAVYYCARVTRDFDYWGQGTLVTVSS

SEQ ID NO: 3940 - protein, 115 aa, Artificial Sequence
  Description of Artificial Sequence: Synthetic polypeptide
EVQLVESGGGLVQPGGSLRLSCAASGFTFYPSWMGWFRQAPGKEREFVATINPYGGRNYADSVKGRFTISADNSKNTAYLQMNSLKPEDTAVYYCARVDRDFDYWGQGTLVTVSS

SEQ ID NO: 3941 - protein, 115 aa, Artificial Sequence
  Description of Artificial Sequence: Synthetic polypeptide
EVQLVESGGGLVQPGGSLRLSCAASGFWFSPSWMGWFRQAPGKEREFVATINEYGGRNYADSVKGRFTISADNSKNTAYLQMNSLKPEDTAVYYCARVDYDFDYWGQGTLVTVSS

SEQ ID NO: 3942 - protein, 115 aa, Artificial Sequence
  Description of Artificial Sequence: Synthetic polypeptide
EVQLVESGGGLVQPGGSLRLSCAASGFWFEPSWMGWFRQAPGKEREFVATINEYGGRNYADSVKGRFTISADNSKNTAYLQMNSLKPEDTAVYYCARVDRDFDYWGQGTLVTVSS

SEQ ID NO: 3943 - protein, 115 aa, Artificial Sequence
  Description of Artificial Sequence: Synthetic polypeptide
EVQLVESGGGLVQPGGSLRLSCAASGFLFSPSWMGWFRQAPGKEREFVATINERGGRNYADSVKGRFTISADNSKNTAYLQMNSLKPEDTAVYYCARVDRDFDYWGQGTLVTVSS

SEQ ID NO: 3944 - protein, 113 aa, Artificial Sequence
  Description of Artificial Sequence: Synthetic polypeptide
EVQLVESGGGLVQPGGSLRLSCAASGQTFVMGWFRQAPGKEREFVAAIGSGGSTSYADSVKGRFTISADNSKNTAYLQMNSLKPEDTAVYYCWRLGNDYFDYWGQGTLVTVSS

SEQ ID NO: 3945 - protein, 113 aa, Artificial Sequence
  Description of Artificial Sequence: Synthetic polypeptide
EVQLVESGGGLVQPGGSLRLSCAASGQTFMMGWFRQAPGKEREFVAAIGSGGSTSYADSVKGRFTISADNSKNTAYLQMNSLKPEDTAVYYCWRLGNDYFDYWGQGTLVTVSS

SEQ ID NO: 3946 - protein, 113 aa, Artificial Sequence
  Description of Artificial Sequence: Synthetic polypeptide
EVQLVESGGGLVQPGGSLRLSCAASGQTFFMGWFRQAPGKEREFVAAIGSGGSTSYADSVKGRFTISADNSKNTAYLQMNSLKPEDTAVYYCWRLGNDYFDYWGQGTLVTVSS

SEQ ID NO: 3947 - protein, 113 aa, Artificial Sequence
  Description of Artificial Sequence: Synthetic polypeptide
EVQLVESGGGLVQPGGSLRLSCAASGQTFLMGWFRQAPGKEREFVAAIGSGGSTSYADSVKGRFTISADNSKNTAYLQMNSLKPEDTAVYYCWRLGNDYFDYWGQGTLVTVSS

SEQ ID NO: 3948 - protein, 113 aa, Artificial Sequence
  Description of Artificial Sequence: Synthetic polypeptide
EVQLVESGGGLVQPGGSLRLSCAASGQTFNMGWFRQAPGKEREFVAAIGSGGSTSYADSVKGRFTISADNSKNTAYLQMNSLKPEDTAVYYCWRYGNDYFDYWGQGTLVTVSS

SEQ ID NO: 3949 - protein, 113 aa, Artificial Sequence
  Description of Artificial Sequence: Synthetic polypeptide
EVQLVESGGGLVQPGGSLRLSCAASGQTFNMGWFRQAPGKEREFVAAIGSGGSTSYADSVKGRFTISADNSKNTAYLQMNSLKPEDTAVYYCWRFGNDYFDYWGQGTLVTVSS

SEQ ID NO: 3950 - protein, 113 aa, Artificial Sequence
  Description of Artificial Sequence: Synthetic polypeptide
EVQLVESGGGLVQPGGSLRLSCAASGQYFNMGWFRQAPGKEREFVAAIGSGGSTSYADSVKGRFTISADNSKNTAYLQMNSLKPEDTAVYYCWRLGNDYFDYWGQGTLVTVSS

SEQ ID NO: 3951 - protein, 113 aa, Artificial Sequence
  Description of Artificial Sequence: Synthetic polypeptide
EVQLVESGGGLVQPGGSLRLSCAASGQTFNMGWFRQAPGKEREFVADIGSGGSTSYADSVKGRFTISADNSKNTAYLQMNSLKPEDTAVYYCWRLGNDYFDYWGQGTLVTVSS

SEQ ID NO: 3952 - protein, 113 aa, Artificial Sequence
  Description of Artificial Sequence: Synthetic polypeptide
EVQLVESGGGLVQPGGSLRLSCAASGQTYNMGWFRQAPGKEREFVAAIGSGGSTSYADSVKGRFTISADNSKNTAYLQMNSLKPEDTAVYYCWRLGNDYFDYWGQGTLVTVSS

SEQ ID NO: 3953 - protein, 113 aa, Artificial Sequence
  Description of Artificial Sequence: Synthetic polypeptide
EVQLVESGGGLVQPGGSLRLSCAASGQFFNMGWFRQAPGKEREFVAAIGSGGSTSYADSVKGRFTISADNSKNTAYLQMNSLKPEDTAVYYCWRLGNDYFDYWGQGTLVTVSS

SEQ ID NO: 3954 - protein, 113 aa, Artificial Sequence
  Description of Artificial Sequence: Synthetic polypeptide
EVQLVESGGGLVQPGGSLRLSCAASGQTFIMGWFRQAPGKEREFVAAGGSGGSTSYADSVKGRFTISADNSKNTAYLQMNSLKPEDTAVYYCWRLGNDYFDYWGQGTLVTVSS

SEQ ID NO: 3955 - protein, 113 aa, Artificial Sequence
  Description of Artificial Sequence: Synthetic polypeptide
EVQLVESGGGLVQPGGSLRLSCAASGQTQPMGWFRQAPGKEREFVAAIGSGGSTSYADSVKGRFTISADNSKNTAYLQMNSLKPEDTAVYYCWRLGNDYFDYWGQGTLVTVSS

SEQ ID NO: 3956 - protein, 113 aa, Artificial Sequence
  Description of Artificial Sequence: Synthetic polypeptide
EVQLVESGGGLVQPGGSLRLSCAASGQTFIMGWFRQAPGKEREFVAAIGSGGSTSYADSVKGRFTISADNSKNTAYLQMNSLKPEDTAVYYCWREGNDYFDYWGQGTLVTVSS

SEQ ID NO: 3957 - protein, 113 aa, Artificial Sequence
  Description of Artificial Sequence: Synthetic polypeptide
EVQLVESGGGLVQPGGSLRLSCAASGQTFTMGWFRQAPGKEREFVAAIGSGGSTSYADSVKGRFTISADNSKNTAYLQMNSLKPEDTAVYYCWREGNDYFDYWGQGTLVTVSS

SEQ ID NO: 3958 - protein, 113 aa, Artificial Sequence
  Description of Artificial Sequence: Synthetic polypeptide
EVQLVESGGGLVQPGGSLRLSCAASGQTFTMGWFRQAPGKEREFVAAIGSGGWTSYADSVKGRFTISADNSKNTAYLQMNSLKPEDTAVYYCWRLGNDYFDYWGQGTLVTVSS

SEQ ID NO: 3959 - protein, 113 aa, Artificial Sequence
  Description of Artificial Sequence: Synthetic polypeptide
EVQLVESGGGLVQPGGSLRLSCAASGQTFTMGWFRQAPGKEREFVAAIGSGGSTSYADSVKGRFTISADNSKNTAYLQMNSLKPEDTAVYYCWRGGNDYFDYWGQGTLVTVSS

SEQ ID NO: 3960 - protein, 113 aa, Artificial Sequence
  Description of Artificial Sequence: Synthetic polypeptide
EVQLVESGGGLVQPGGSLRLSCAASGQTFTMGWFRQAPGKEREFVAAGGSGGSTSYADSVKGRFTISADNSKNTAYLQMNSLKPEDTAVYYCWRLGNDYFDYWGQGTLVTVSS

SEQ ID NO: 3961 - protein, 113 aa, Artificial Sequence
  Description of Artificial Sequence: Synthetic polypeptide
EVQLVESGGGLVQPGGSLRLSCAASGQTFFFGWFRQAPGKEREFVAAIGSGGSTSYADSVKGRFTISADNSKNTAYLQMNSLKPEDTAVYYCWRLGNDYFDYWGQGTLVTVSS

SEQ ID NO: 3962 - protein, 113 aa, Artificial Sequence
  Description of Artificial Sequence: Synthetic polypeptide
EVQLVESGGGLVQPGGSLRLSCAASGQTFTMGWFRQAPGKEREFVAPIGSGGSTSYADSVKGRFTISADNSKNTAYLQMNSLKPEDTAVYYCWRLGNDYFDYWGQGTLVTVSS

SEQ ID NO: 3963 - protein, 113 aa, Artificial Sequence
  Description of Artificial Sequence: Synthetic polypeptide
EVQLVESGGGLVQPGGSLRLSCAASGQTFMMGWFRQAPGKEREFVAAIGSGGSTSYADSVKGRFTISADNSKNTAYLQMNSLKPEDTAVYYCWRYGNDYFDYWGQGTLVTVSS

SEQ ID NO: 3964 - protein, 113 aa, Artificial Sequence
  Description of Artificial Sequence: Synthetic polypeptide
EVQLVESGGGLVQPGGSLRLSCAASGQTFVMGWFRQAPGKEREFVAAIGSGGSTSYADSVKGRFTISADNSKNTAYLQMNSLKPEDTAVYYCWRYGNDYFDYWGQGTLVTVSS

SEQ ID NO: 3965 - protein, 113 aa, Artificial Sequence
  Description of Artificial Sequence: Synthetic polypeptide
EVQLVESGGGLVQPGGSLRLSCAASGQTFMMGWFRQAPGKEREFVGAIGSGGSTSYADSVKGRFTISADNSKNTAYLQMNSLKPEDTAVYYCWRLGNDYFDYWGQGTLVTVSS

SEQ ID NO: 3966 - protein, 113 aa, Artificial Sequence
  Description of Artificial Sequence: Synthetic polypeptide
EVQLVESGGGLVQPGGSLRLSCAASGQTFTMGWFRQAPGKEREFVAAIGSGGSTSYADSVKGRFTISADNSKNTAYLQMNSLKPEDTAVYYCWRLTNDYFDYWGQGTLVTVSS

SEQ ID NO: 3967 - protein, 113 aa, Artificial Sequence
  Description of Artificial Sequence: Synthetic polypeptide
EVQLVESGGGLVQPGGSLRLSCAASGQTFFVGWFRQAPGKEREFVAAIGSGGSTSYADSVKGRFTISADNSKNTAYLQMNSLKPEDTAVYYCWRLGNDYFDYWGQGTLVTVSS

SEQ ID NO: 3968 - protein, 113 aa, Artificial Sequence
  Description of Artificial Sequence: Synthetic polypeptide
EVQLVESGGGLVQPGGSLRLSCAASGQTFVFGWFRQAPGKEREFVAAIGSGGSTSYADSVKGRFTISADNSKNTAYLQMNSLKPEDTAVYYCWRLGNDYFDYWGQGTLVTVSS

SEQ ID NO: 3969 - protein, 113 aa, Artificial Sequence
  Description of Artificial Sequence: Synthetic polypeptide
EVQLVESGGGLVQPGGSLRLSCAASGQTFIMGWFRQAPGKEREFVAAGGSGGSPSYADSVKGRFTISADNSKNTAYLQMNSLKPEDTAVYYCWRYGNDYFDYWGQGTLVTVSS

SEQ ID NO: 3970 - protein, 113 aa, Artificial Sequence
  Description of Artificial Sequence: Synthetic polypeptide
EVQLVESGGGLVQPGGSLRLSCAASGQTFIMGWFRQAPGKEREFVAAGGSGGSTSYADSVKGRFTISADNSKNTAYLQMNSLKPEDTAVYYCWRYGNDYFDYWGQGTLVTVSS

SEQ ID NO: 3971 - protein, 113 aa, Artificial Sequence
  Description of Artificial Sequence: Synthetic polypeptide
EVQLVESGGGLVQPGGSLRLSCAASGQTFIMGWFRQAPGKEREFVAAGGSGGSPSYADSVKGRFTISADNSKNTAYLQMNSLKPEDTAVYYCWRLGNDYFDYWGQGTLVTVSS

SEQ ID NO: 3972 - protein, 113 aa, Artificial Sequence
  Description of Artificial Sequence: Synthetic polypeptide
EVQLVESGGGLVQPGGSLRLSCAASGQTFIMGWFRQAPGKEREFVGAGGSGGSTSYADSVKGRFTISADNSKNTAYLQMNSLKPEDTAVYYCWRLGNDYFDYWGQGTLVTVSS

SEQ ID NO: 3973 - protein, 113 aa, Artificial Sequence
  Description of Artificial Sequence: Synthetic polypeptide
EVQLVESGGGLVQPGGSLRLSCAASGQTQPMGWFRQAPGKEREFVAAIGSGGSTSYADSVKGRFTISADNSKNTAYLQMNSLKPEDTAVYYCWRYGNDYFDYWGQGTLVTVSS

SEQ ID NO: 3974 - protein, 113 aa, Artificial Sequence
  Description of Artificial Sequence: Synthetic polypeptide
EVQLVESGGGLVQPGGSLRLSCAASGQTFIMGWFRQAPGKEREFVAAGGSGGSTSPADSVKGRFTISADNSKNTAYLQMNSLKPEDTAVYYCWRLGNDYFDYWGQGTLVTVSS

SEQ ID NO: 3975 - protein, 113 aa, Artificial Sequence
  Description of Artificial Sequence: Synthetic polypeptide
EVQLVESGGGLVQPGGSLRLSCAASGQTFIMGWFRQAPGKEREFVAAGGSGGSTSYADSVKGRFTISADNSKNTAYLQMNSLKPEDTAVYYCWRFGNDYFDYWGQGTLVTVSS

SEQ ID NO: 3976 - protein, 113 aa, Artificial Sequence
  Description of Artificial Sequence: Synthetic polypeptide
EVQLVESGGGLVQPGGSLRLSCAASGQTFIMGWFRQAPGKEREFVAAGGSGGSTSYADSVKGRFTISADNSKNTAYLQMNSLKPEDTAVYYCPRLGNDYFDYWGQGTLVTVSS

SEQ ID NO: 3977 - protein, 113 aa, Artificial Sequence
  Description of Artificial Sequence: Synthetic polypeptide
EVQLVESGGGLVQPGGSLRLSCAASGQTFIMGWFRQAPGKEREFVAAGGSGGSTSYADSVKGRFTISADNSKNTAYLQMNSLKPEDTAVYYCWRTGNDYFDYWGQGTLVTVSS

SEQ ID NO: 3978 - protein, 113 aa, Artificial Sequence
  Description of Artificial Sequence: Synthetic polypeptide
EVQLVESGGGLVQPGGSLRLSCAASGQTQPMGWFRQAPGKEREFVAAIGSGGSTSYADSVKGRFTISADNSKNTAYLQMNSLKPEDTAVYYCWRHGNDYFDYWGQGTLVTVSS

SEQ ID NO: 3979 - protein, 118 aa, Artificial Sequence
  Description of Artificial Sequence: Synthetic polypeptide
EVQLVESGGGLVQPGGSLRLSCAASGSIFRSNAMGWFRQAPGKEREWVATIGSDGTTIYADSVKGRFTISADNSKNTAYLQMNSLKPEDTAVYYCAGDYDFWSGFDHWGQGTLVTVSS

SEQ ID NO: 3980 - protein, 126 aa, Artificial Sequence
  Description of Artificial Sequence: Synthetic polypeptide
EVQLVESGGGLVQPGGSLRLSCAASGFDFSVSWMGWFRQAPGKEREFVASTNSAGSTYADSVKGRFTISADNSKNTAYLQMNSLKPEDTAVYYCARHYYDSSDYYPHYYYYGMDVWGQGTLVTVSS

SEQ ID NO: 3981 - protein, 124 aa, Artificial Sequence
  Description of Artificial Sequence: Synthetic polypeptide
EVQLVESGGGLVQPGGSLRLSCAASGYTYSSNWMGWFRQAPGKEREFVSAIDSEGRTSYADSVKGRFTISADNSKNTAYLQMNSLKPEDTAVYYCARHMGYYDSGTYFDYFDYWGQGTLVTVSS

SEQ ID NO: 3982 - protein, 118 aa, Artificial Sequence
  Description of Artificial Sequence: Synthetic polypeptide
EVQLVESGGGLVQPGGSLRLSCAASGGTFSFYGMGWFRQAPGKEREFVATISWSGGDGRSYYADSVKGRFTISADNSKNTAYLQMNSLKPEDTAVYYCTTVDQYFDYWGQGTLVTVSS

SEQ ID NO: 3983 - protein, 117 aa, Artificial Sequence
  Description of Artificial Sequence: Synthetic polypeptide
EVQLVESGGGLVQPGGSLRLSCAASGSIFRSNAMGWFRQAPGKEREWVATIGSDGTTIYADSVKGRFTISADNSKNTAYLQMNSLKPEDTAVYYCARYDFWSGYPYWGQGTLVTVSS

SEQ ID NO: 3984 - protein, 123 aa, Artificial Sequence
  Description of Artificial Sequence: Synthetic polypeptide
EVQLVESGGGLVQPGGSLRLSCAASGDIFSINAMGWFRQAPGKEHEFVASISGSDKITNYADSVKGRFTISADNSKNTAYLQMNSLKPEDTAVYYCAKFAVYDYWSGTSFDYWGQGTLVTVSS

SEQ ID NO: 3985 - protein, 120 aa, Artificial Sequence
  Description of Artificial Sequence: Synthetic polypeptide
EVQLVESGGGLVQPGGSLRLSCAASGFTFDRSWMGWFRQAPGKEREFVAAISGSGGSTNYADSVKGRFTISADNSKNTAYLQMNSLKPEDTAVYYCTSLVGLTAGFADYWGQGTLVTVSS

SEQ ID NO: 3986 - protein, 117 aa, Artificial Sequence
  Description of Artificial Sequence: Synthetic polypeptide
EVQLVESGGGLVQPGGSLRLSCAASDSTFSIDVMGWFRQAPGKEREFVAAISWSAGSTLYADSVKGRFTISADNSKNTAYLQMNSLKPEDTAVYYCAAFDGYTGSDWGQGTLVTVSS

SEQ ID NO: 3987 - protein, 119 aa, Artificial Sequence
  Description of Artificial Sequence: Synthetic polypeptide
EVQLVESGGGLVQPGGSLRLSCAASGDTFSWYAMGWFRQAPGKEREFVAVISWSGAYTEYADSVKGRFTISADNSKNTAYLQMNSLKPEDTAVYYCAGDYDFWSGFDHWGQGTLVTVSS

SEQ ID NO: 3988 - protein, 115 aa, Artificial Sequence
  Description of Artificial Sequence: Synthetic polypeptide
EVQLVESGGGLVQPGGSLRLSCAASGEEFSDHWMGWFRQAPGKEREFVGTINSGGDTNYADSVKGRFTISADNSKNTAYLQMNSLKPEDTAVYYCARADNYFDYWGQGTLVTVSS

SEQ ID NO: 3989 - protein, 117 aa, Artificial Sequence
  Description of Artificial Sequence: Synthetic polypeptide
EVQLVESGGGLVQPGGSLRLSCAASGSTFRINVMGWFRQAPGKEREFVAATSWSGGTTVYADSVKGRFTISADNSKNTAYLQMNSLKPEDTAVYYCAAFDGYTGSDWGQGTLVTVSS

SEQ ID NO: 3990 - protein, 120 aa, Artificial Sequence
  Description of Artificial Sequence: Synthetic polypeptide
EVQLVESGGGLVQPGGSLRLSCAASGGTFSTYGMGWFRQAPGKEREFVAAISWGGGSDTLYADSVKGRFTISADNSKNTAYLQMNSLKPEDTAVYYCARDYGDYYYFDYWGQGTLVTVSS

SEQ ID NO: 3991 - protein, 119 aa, Artificial Sequence
  Description of Artificial Sequence: Synthetic polypeptide
EVQLVESGGGLVQPGGSLRLSCAASGFTFDRSWMGWFRQAPGKEREFVTVITWSGGSTYYADSVKGRFTISADNSKNTAYLQMNSLKPEDTAVYYCAKGPSSGYAFDIWGQGTLVTVSS

SEQ ID NO: 3992 - protein, 115 aa, Artificial Sequence
  Description of Artificial Sequence: Synthetic polypeptide
EVQLVESGGGLVQPGGSLRLSCAASGSIFETNTMGWFRQAPGKERELVASITSGGSTVYADSVKGRFTISADNSKNTAYLQMNSLKPEDTAVYYCTTVDQYFDYWGQGTLVTVSS

SEQ ID NO: 3993 - protein, 116 aa, Artificial Sequence
  Description of Artificial Sequence: Synthetic polypeptide
EVQLVESGGGLVQPGGSLRLSCAASGFTDGIDAMGWFRQAPGKESEWVSAISWNGSNTYYADSVKGRFTISADNSKNTAYLQMNSLKPEDTAVYYCTTVDQYFDYWGQGTLVTVSS

SEQ ID NO: 3994 - protein, 117 aa, Artificial Sequence
  Description of Artificial Sequence: Synthetic polypeptide
EVQLVESGGGLVQPGGSLRLSCAASGNTFSINVMGWFRQAPGKERELVAAISWSGASTIYADSVKGRFTISADNSKNTAYLQMNSLKPEDTAVYYCAAFDGYSGSDWGQGTLVTVSS

SEQ ID NO: 3995 - protein, 118 aa, Artificial Sequence
  Description of Artificial Sequence: Synthetic polypeptide
EVQLVESGGGLVQPGGSLRLSCAASGSDVWFNVMGWFRQAPGKERELVATITRALNTAYADSVKGRFTISADNSKNTAYLQMNSLKPEDTAVYYCTTFNWNDEGFDYWGQGTLVTVSS

SEQ ID NO: 3996 - protein, 117 aa, Artificial Sequence
  Description of Artificial Sequence: Synthetic polypeptide
EVQLVESGGGLVQPGGSLRLSCAASGSTFSVNVMGWFRQAPGKERELVAAISWSGASTIYADSVKGRFTISADNSKNTAYLQMNSLKPEDTAVYYCAAFDGYTGSDWGQGTLVTVSS

SEQ ID NO: 3997 - protein, 115 aa, Artificial Sequence
  Description of Artificial Sequence: Synthetic polypeptide
EVQLVESGGGLVQPGGSLRLSCAASGVTLDDYAMGWFRQAPGKEREWVSEITSGGYTYADSVKGRFTISADNSKNTAYLQMNSLKPEDTAVYYCVRSNMAGFDHWGQGTLVTVSS

SEQ ID NO: 3998 - protein, 117 aa, Artificial Sequence
  Description of Artificial Sequence: Synthetic polypeptide
EVQLVESGGGLVQPGGSLRLSCAASGDTYGSYWMGWFRQAPGKEREGISLITSDDGSTYYADSVKGRFTISADNSKNTAYLQMNSLKPEDTAVYYCAAFDGYSGSDWGQGTLVTVSS

SEQ ID NO: 3999 - protein, 109 aa, Artificial Sequence
  Description of Artificial Sequence: Synthetic polypeptide
QSALTQPASVSGSPGQSITISCTGTSSDVGSNNLVSWYQQHPGKAPKLMIYEGDKRPSGVSNRFSGSKSGNTASLTISGLQAEDEADYYCCSYATGFYVFGGGTKLTVL

SEQ ID NO: 4000 - protein, 110 aa, Artificial Sequence
  Description of Artificial Sequence: Synthetic polypeptide
QSALTQPASVSGSPGQSITISCTGTSSVGGYNLVSWYQQHPGKAPKLMIYEGSKRPSGVSNRFSGSKSGNTASLTISGLQAEDEADYYCCSYAGSYTLAVFGGGTKLTVL

SEQ ID NO: 4001 - protein, 113 aa, Artificial Sequence
  Description of Artificial Sequence: Synthetic polypeptide
QSALTQPASVSGSPGQSITISCTGTSSNVGSYNLVSWYQQHPGKAPKLMIYEGTKRPSGVSNRFSGSKSGNTASLTISGLQAEDEADYYCCSYAGSSTFKAYVFGGGTKLTVL

SEQ ID NO: 4002 - protein, 111 aa, Artificial Sequence
  Description of Artificial Sequence: Synthetic polypeptide
QSALTQPASVSGSPGQSITISCTGTSSDVGGYNLVSWYQQHPGKAPKLMIYEGTKRPSGVSNRFSGSKSGNTASLTISGLQAEDEADYYCCSYAGSSTHYVFGGGTKLTVL

SEQ ID NO: 4003 - protein, 112 aa, Artificial Sequence
  Description of Artificial Sequence: Synthetic polypeptide
QSALTQPASVSGSPGQSITISCTGTSSDVGSYHLVSWYQQHPGKAPKLMIYEGTKRPSGVSNRFSGSKSGNTASLTISGLQAEDEADYYCCSYAGSYTFGVVFGGGTKLTVL

SEQ ID NO: 4004 - protein, 110 aa, Artificial Sequence
  Description of Artificial Sequence: Synthetic polypeptide
QSALTQPASVSGSPGQSITISCTGTSSDVGSNNLVSWYQQHPGKAPKLMIYEGGKRPSGVSNRFSGSKSGNTASLTISGLQAEDEADYYCCSYSGRYTYVFGGGTKLTVL

SEQ ID NO: 4005 - protein, 111 aa, Artificial Sequence
  Description of Artificial Sequence: Synthetic polypeptide
QSALTQPASVSGSPGQSITISCTGTSSDVGNYNLVSWYQQHPGKAPKLMIYEGTKRPSGVSNRFSGSKSGNTASLTISGLQAEDEADYYCCSYAGSYTFAVFGGGTKLTVL

SEQ ID NO: 4006 - protein, 110 aa, Artificial Sequence
  Description of Artificial Sequence: Synthetic polypeptide
QSALTQPASVSGSPGQSITISCTGTSSDIGSYNLVSWYQQHPGKAPKLMIYEASRPSGVSNRFSGSKSGNTASLTISGLQAEDEADYYCCSYAGSGIFYVFGGGTKLTVL

SEQ ID NO: 4007 - protein, 110 aa, Artificial Sequence
  Description of Artificial Sequence: Synthetic polypeptide
QSALTQPASVSGSPGQSITISCTGTGSDVGYNLVSWYQQHPGKAPKLMIYEVSKRPSGVSNRFSGSKSGNTASLTISGLQAEDEADYYCCSYAGSSTFEVFGGGTKLTVL

SEQ ID NO: 4008 - protein, 111 aa, Artificial Sequence
  Description of Artificial Sequence: Synthetic polypeptide
QSALTQPASVSGSPGQSITISCTGTSSDVGDYNLVSWYQQHPGKAPKLMIYEGGKRPSGVSNRFSGSKSGNTASLTISGLQAEDEADYYCCSYAGSSTNVVFGGGTKLTVL

SEQ ID NO: 4009 - protein, 109 aa, Artificial Sequence
  Description of Artificial Sequence: Synthetic polypeptide
QSALTQPASVSGSPGQSITISCTGTSSDVGTYNLVSWYQQHPGKAPKLMIYEGYKRPSGVSNRFSGSKSGNTASLTISGLQAEDEADYYCCSYAGNLWLFGGGTKLTVL

SEQ ID NO: 4010 - protein, 111 aa, Artificial Sequence
  Description of Artificial Sequence: Synthetic polypeptide
QSALTQPASVSGSPGQSITISCTGTSSDVGHYNLVSWYQQHPGKAPKLMIYEGGKRPSGVSNRFSGSKSGNTASLTISGLQAEDEADYYCCSYAGRDTYVAFGGGTKLTVL

SEQ ID NO: 4011 - protein, 110 aa, Artificial Sequence
  Description of Artificial Sequence: Synthetic polypeptide
QSALTQPASVSGSPGQSITISCTGTSSDVGRYNLVSWYQQHPGKAPKLMIYEGTKRPSGVSNRFSGSKSGNTASLTISGLQAEDEADYYCCSYAGSRTVVFGGGTKLTVL

SEQ ID NO: 4012 - protein, 109 aa, Artificial Sequence
  Description of Artificial Sequence: Synthetic polypeptide
QSALTQPASVSGSPGQSITISCTGASSDVGSYNLVSWYQQHPGKAPKLMIYEGTKRPSGVSNRFSGSKSGNTASLTISGLQAEDEADYYCCSYAGSSGVFGGGTKLTVL

SEQ ID NO: 4013 - protein, 111 aa, Artificial Sequence
  Description of Artificial Sequence: Synthetic polypeptide
QSALTQPASVSGSPGQSITISCTGTSTDVGSYNLVSWYQQHPGKAPKLMIYEGFKRPSGVSNRFSGSKSGNTASLTISGLQAEDEADYYCCSYAGSYTLGVFGGGTKLTVL

SEQ ID NO: 4014 - protein, 109 aa, Artificial Sequence
  Description of Artificial Sequence: Synthetic polypeptide
QSALTQPASVSGSPGQSITISCTGTTSDVGSYNLVSWYQQHPGKAPKLMIYEGTKRPSGVSNRFSGSKSGNTASLTISGLQAKDEADYYCSYTSSRTGVFGGGTKLTVL

SEQ ID NO: 4015 - protein, 108 aa, Artificial Sequence
  Description of Artificial Sequence: Synthetic polypeptide
QSALTQPASVSGSPGQSITISCTATSSDVGSYNLVSWYQQHPGKAPKLMIYEGTKRPSGVSNRFSGSKSGNTASLTISGLQAEDEADYYCCSYAGSWVFGGGTKLTVL

SEQ ID NO: 4016 - protein, 111 aa, Artificial Sequence
  Description of Artificial Sequence: Synthetic polypeptide
QSALTQPASVSGSPGQSITISCTGTSSDVGSNNLVSWYQQHPGKAPKLMIYEGSKWPSGVSNRFSGSKSGNTASLTISGLQAEDEADYYCCSFAGSSTDVVFGGGTKLTVL

SEQ ID NO: 4017 - protein, 110 aa, Artificial Sequence
  Description of Artificial Sequence: Synthetic polypeptide
QSALTQPASVSGSPGQSITISCTGASSDVGSYNLVSWYQQHPGKAPKLMIYEGFKRPSGVSNRFSGSKSGNTASLTISGLQAEDEADYYCCSYAGSHTYVFGGGTKLTVL

SEQ ID NO: 4018 - protein, 109 aa, Artificial Sequence
  Description of Artificial Sequence: Synthetic polypeptide
QSALTQPASVSGSPGQSITISCTGTSSDVGSYYLVSWYQQHPGKAPKLMIYEGFKRPSGVSNRFSGSKSGNTASLTISGLQAEDEADYYCCSYAGSLYVFGGGTKLTVL

SEQ ID NO: 4019 - protein, 109 aa, Artificial Sequence
  Description of Artificial Sequence: Synthetic polypeptide
QSALTQPASVSGSPGQSITISCTGTSSDVGSYSLVSWYQQHPGKAPKLMIYEGDKRPSGVSNRFSGSKSGNTASLTISGLQAEDEADYYCCSYAGSRRVFGGGTKLTVL

SEQ ID NO: 4020 - protein, 110 aa, Artificial Sequence
  Description of Artificial Sequence: Synthetic polypeptide
QSALTQPASVSGSPGQSITISCTGSSSDVGSYNLVSWYQQHPGKAPKLMIYEGTKRPSGVSNRFSGSKSGNTASLTISGLQAEDEADYYCCSYAGSSNWVFGGGTKLTVL

SEQ ID NO: 4021 - protein, 112 aa, Artificial Sequence
  Description of Artificial Sequence: Synthetic polypeptide
QSALTQPASVSGSPGQSITISCTGTSSDVGYYNLVSWYQQHPGKAPKLMIYEGGKRPSGVSNRFSGSKSGNTASLTISGLQAEDEADYYCCSYAGSSTPYVVFGGGTKLTVL

SEQ ID NO: 4022 - protein, 111 aa, Artificial Sequence; identical to SEQ ID NO: 4016
  Description of Artificial Sequence: Synthetic polypeptide

SEQ ID NO: 4023 - protein, 110 aa, Artificial Sequence
  Description of Artificial Sequence: Synthetic polypeptide
QSALTQPASVSGSPGQSITISCTGTSSDVGSSNLVSWYQQHPGKAPKLMIYEGDKRPSGVSNRFSGSKSGNTASLTISGLQAEDEADYYCCSYAGSYGVVFGGGTKLTVL

SEQ ID NO: 4024 - protein, 110 aa, Artificial Sequence
  Description of Artificial Sequence: Synthetic polypeptide
QSALTQPASVSGSPGQSITISCTGTSSDIGSYNLVSWYQQHPGKAPKLMIYEGFKRPSGVSNRFSGSKSGNTASLTISGLQAEDEADYYCCSYAGSYSVVFGGGTKLTVL

SEQ ID NO: 4025 - protein, 111 aa, Artificial Sequence
  Description of Artificial Sequence: Synthetic polypeptide
QSALTQPASVSGSPGQSITISCTGTSSDVGAYNLVSWYQQHPGKAPKLMIHEGNKRPSGVSNRFSGSKSGNTASLTISGLQAEDEADYYCCSYAGDSFPYVFGGGTKLTVL

SEQ ID NO: 4026 - protein, 111 aa, Artificial Sequence
  Description of Artificial Sequence: Synthetic polypeptide
QSALTQPASVSGSPGQSITISCTGTSRDVGSYNLVSWYQQHPGKAPKLMIYEASKRPSGVSNRFSGSKSGNTASLTISGLQAEDEADYYCCSYAGSYTLYVFGGGTKLTVL

SEQ ID NO: 4027 - protein, 110 aa, Artificial Sequence
  Description of Artificial Sequence: Synthetic polypeptide
QSALTQPASVSGSPGQSITISCTGTSSDVGHYNLVSWYQQHPGKAPKLMIYEGGKRPSGVSNRFSGSKSGNTASLTISGLQAEDEADYYCCSYAGSSIYVFGGGTKLTVL

SEQ ID NO: 4028 - protein, 108 aa, Artificial Sequence
  Description of Artificial Sequence: Synthetic polypeptide
QSALTQPASVSGSPGQSITISCTGTSSDVGNYNLVSWYQQHPGKAPKLMIYEGTKRPSGVSNRFSGSKSGNTASLTISGLQAEDEADYYCCSYAGTVVFGGGTKLTVL

SEQ ID NO: 4029 - protein, 109 aa, Artificial Sequence
  Description of Artificial Sequence: Synthetic polypeptide
QSALTQPASVSGSPGQSITISCTGTSSDVGKYNLVSWYQQHPGKAPKLMIYEGSQRPSGVSNRFSGSKSGNTASLTISGLQAEDEADYYCCSYAGSSTVFGGGTKLTVL

SEQ ID NO: 4030 - protein, 110 aa, Artificial Sequence
  Description of Artificial Sequence: Synthetic polypeptide
QSALTQPASVSGSPGQSITISCTGTSSDVGSNNLVSWYQQHPGKAPKLMIYEGDKRPSGVSNRFSGSKSGNTASLTISGLQAEDEADYYCCSYTGSYTVVFGGGTKLTVL

SEQ ID NO: 4031 - protein, 111 aa, Artificial Sequence; identical to SEQ ID NO: 4008
  Description of Artificial Sequence: Synthetic polypeptide

SEQ ID NO: 4032 - protein, 111 aa, Artificial Sequence
  Description of Artificial Sequence: Synthetic polypeptide
QSALTQPASVSGSPGQSITISCTGTSSDVGKYNLVSWYQQHPGKAPKLMIYEASKRPSGVSNRFSGSKSGNTASLTISGLQAEDEADYYCYSYAGSYTLGVFGGGTKLTVL

SEQ ID NO: 4033 - protein, 111 aa, Artificial Sequence
  Description of Artificial Sequence: Synthetic polypeptide
QSALTQPASVSGSPGQSITISCTGTSSDVGSYNHVSWYQQHPGKAPKLMIYEGGKRPSGVSNRFSGSKSGNTASLTISGLQAEDEADYYCCSYAGTTTPFVFGGGTKLTVL

SEQ ID NO: 4034 - protein, 110 aa, Artificial Sequence
  Description of Artificial Sequence: Synthetic polypeptide
QSALTQPASVSGSPGQSITISCTGTSSDVGKYNLVSWYQQHPGKAPKLMIYETRKRPSGVSNRFSGSKSGNTASLTISGLQAEDEADYYCCSYAGSSTVVFGGGTKLTVL

SEQ ID NO: 4035 - protein, 107 aa, Artificial Sequence; identical to SEQ ID NO: 3436
  Description of Artificial Sequence: Synthetic polypeptide

SEQ ID NO: 4036 - protein, 108 aa, Artificial Sequence; identical to SEQ ID NO: 3437
  Description of Artificial Sequence: Synthetic polypeptide

SEQ ID NO: 4037 - protein, 108 aa, Artificial Sequence; identical to SEQ ID NO: 13
  Description of Artificial Sequence: Synthetic polypeptide

SEQ ID NO: 4038 - protein, 106 aa, Artificial Sequence; identical to SEQ ID NO: 7
  Description of Artificial Sequence: Synthetic polypeptide

SEQ ID NO: 4039 - protein, 108 aa, Artificial Sequence; identical to SEQ ID NO: 1
  Description of Artificial Sequence: Synthetic polypeptide

SEQ ID NO: 4040 - protein, 108 aa, Artificial Sequence; identical to SEQ ID NO: 1
  Description of Artificial Sequence: Synthetic polypeptide

SEQ ID NO: 4041 - protein, 107 aa, Artificial Sequence; identical to SEQ ID NO: 3442
  Description of Artificial Sequence: Synthetic polypeptide

SEQ ID NO: 4042 - protein, 108 aa, Artificial Sequence; identical to SEQ ID NO: 3444
  Description of Artificial Sequence: Synthetic polypeptide

SEQ ID NO: 4043 - protein, 108 aa, Artificial Sequence; identical to SEQ ID NO: 3445
  Description of Artificial Sequence: Synthetic polypeptide

SEQ ID NO: 4044 - protein, 108 aa, Artificial Sequence; identical to SEQ ID NO: 3447
  Description of Artificial Sequence: Synthetic polypeptide

SEQ ID NO: 4045 - protein, 108 aa, Artificial Sequence; identical to SEQ ID NO: 1
  Description of Artificial Sequence: Synthetic polypeptide

SEQ ID NO: 4046 - protein, 108 aa, Artificial Sequence; identical to SEQ ID NO: 1
  Description of Artificial Sequence: Synthetic polypeptide

SEQ ID NO: 4047 - protein, 107 aa, Artificial Sequence; identical to SEQ ID NO: 3449
  Description of Artificial Sequence: Synthetic polypeptide

SEQ ID NO: 4048 - protein, 107 aa, Artificial Sequence; identical to SEQ ID NO: 3450
  Description of Artificial Sequence: Synthetic polypeptide

SEQ ID NO: 4049 - protein, 108 aa, Artificial Sequence; identical to SEQ ID NO: 13
  Description of Artificial Sequence: Synthetic polypeptide

SEQ ID NO: 4050 - protein, 108 aa, Artificial Sequence; identical to SEQ ID NO: 13
  Description of Artificial Sequence: Synthetic polypeptide

SEQ ID NO: 4051 - protein, 106 aa, Artificial Sequence; identical to SEQ ID NO: 5
  Description of Artificial Sequence: Synthetic polypeptide

SEQ ID NO: 4052 - protein, 108 aa, Artificial Sequence
  Description of Artificial Sequence: Synthetic polypeptide
DIQMTQSPSSLSASVGDRVTITCRASQTIRTYLNWYRQKPGKAPKLLIYDASTLQRGVPSRFSGSGSGTDFTLTISSLQPEDFATYYCQQSYRTPPWTFGGGTKVEIK

SEQ ID NO: 4053 - protein, 107 aa, Artificial Sequence
  Description of Artificial Sequence: Synthetic polypeptide
DIQMTQSPSSLSASVGDRVTITCRSSQSISSYLNWYQQKPGEAPKLLIYGASRLRSGVPSRFSGSGSGTDFTLTISSLQPEDFATYYCQQGYSAPWTFGGGTKVEIK

SEQ ID NO: 4054 - protein, 107 aa, Artificial Sequence
  Description of Artificial Sequence: Synthetic polypeptide
DIQMTQSPSSLSASVGDRVTITCRASQSISGSLNWYQQKPGKAPKLLIYAESRLHSGVPSRFSGSGSGTDFTLTISSLQPEDFATYYCQQSYSPPQTFGGGTKVEIK

SEQ ID NO: 4055 - protein, 107 aa, Artificial Sequence
  Description of Artificial Sequence: Synthetic polypeptide
DIQMTQSPSSLSASVGDRVTITCRASRSISTYLNWYQQKPGKAPKLLIYAASNLQGGVPSRLSGSGSGTDFTLTISSLQPEDFATYYCQQSHSIPRTFGGGTKVEIK

SEQ ID NO: 4056 - protein, 108 aa, Artificial Sequence; identical to SEQ ID NO: 13
  Description of Artificial Sequence: Synthetic polypeptide

SEQ ID NO: 4057 - protein, 107 aa, Artificial Sequence
  Description of Artificial Sequence: Synthetic polypeptide
DIQMTQSPSSLSASVGDRVTITCRASQSIRKYLNWYQQKPGKAPKLLIYASSTLQRGVPSRFSGSGSGTDFTLTISSLQPEDFATYYCQQSLSTPFTFGGGTKVEIK

SEQ ID NO: 4058 - protein, 107 aa, Artificial Sequence; identical to SEQ ID NO: 3479
  Description of Artificial Sequence: Synthetic polypeptide

SEQ ID NO: 4059 - protein, 107 aa, Artificial Sequence; identical to SEQ ID NO: 3483
  Description of Artificial Sequence: Synthetic polypeptide

SEQ ID NO: 4060 - protein, 103 aa, Artificial Sequence; identical to SEQ ID NO: 3478
  Description of Artificial Sequence: Synthetic polypeptide

SEQ ID NO: 4061 - protein, 107 aa, Artificial Sequence; identical to SEQ ID NO: 3484
  Description of Artificial Sequence: Synthetic polypeptide

SEQ ID NO: 4062 - protein, 107 aa, Artificial Sequence; identical to SEQ ID NO: 3480
  Description of Artificial Sequence: Synthetic polypeptide

SEQ ID NO: 4063 - protein, 107 aa, Artificial Sequence; identical to SEQ ID NO: 3477
  Description of Artificial Sequence: Synthetic polypeptide

SEQ ID NO: 4064 - protein, 107 aa, Artificial Sequence; identical to SEQ ID NO: 3481
  Description of Artificial Sequence: Synthetic polypeptide

SEQ ID NO: 4065 - protein, 107 aa, Artificial Sequence; identical to SEQ ID NO: 3482
  Description of Artificial Sequence: Synthetic polypeptide

SEQ ID NO: 4066 - protein, 107 aa, Artificial Sequence; identical to SEQ ID NO: 3486
  Description of Artificial Sequence: Synthetic polypeptide

SEQ ID NO: 4067 - protein, 107 aa, Artificial Sequence; identical to SEQ ID NO: 3487
  Description of Artificial Sequence: Synthetic polypeptide

SEQ ID NO: 4068 - protein, 107 aa, Artificial Sequence; identical to SEQ ID NO: 3485
  Description of Artificial Sequence: Synthetic polypeptide

SEQ ID NO: 4069 - protein, 107 aa, Artificial Sequence; identical to SEQ ID NO: 3489
  Description of Artificial Sequence: Synthetic polypeptide

SEQ ID NO: 4070 - protein, 107 aa, Artificial Sequence; identical to SEQ ID NO: 3484
  Description of Artificial Sequence: Synthetic polypeptide

SEQ ID NO: 4071 - protein, 107 aa, Artificial Sequence; identical to SEQ ID NO: 3488
  Description of Artificial Sequence: Synthetic polypeptide

SEQ ID NO: 4072 - protein, 107 aa, Artificial Sequence; identical to SEQ ID NO: 3505
  Description of Artificial Sequence: Synthetic polypeptide

SEQ ID NO: 4073 - protein, 107 aa, Artificial Sequence; identical to SEQ ID NO: 3506
  Description of Artificial Sequence: Synthetic polypeptide

SEQ ID NO: 4074 - protein, 107 aa, Artificial Sequence; identical to SEQ ID NO: 3507
  Description of Artificial Sequence: Synthetic polypeptide

SEQ ID NO: 4075 - protein, 107 aa, Artificial Sequence; identical to SEQ ID NO: 3508
  Description of Artificial Sequence: Synthetic polypeptide

SEQ ID NO: 4076 - protein, 107 aa, Artificial Sequence; identical to SEQ ID NO: 3509
  Description of Artificial Sequence: Synthetic polypeptide

SEQ ID NO: 4077 - protein, 107 aa, Artificial Sequence; identical to SEQ ID NO: 3510
  Description of Artificial Sequence: Synthetic polypeptide

SEQ ID NO: 4078 - protein, 107 aa, Artificial Sequence; identical to SEQ ID NO: 3511
  Description of Artificial Sequence: Synthetic polypeptide

SEQ ID NO: 4079 - protein, 107 aa, Artificial Sequence; identical to SEQ ID NO: 3512
  Description of Artificial Sequence: Synthetic polypeptide

SEQ ID NO: 4080 - protein, 107 aa, Artificial Sequence; identical to SEQ ID NO: 3513
  Description of Artificial Sequence: Synthetic polypeptide

SEQ ID NO: 4081 - protein, 107 aa, Artificial Sequence; identical to SEQ ID NO: 3514
  Description of Artificial Sequence: Synthetic polypeptide

SEQ ID NO: 4082 - protein, 107 aa, Artificial Sequence; identical to SEQ ID NO: 3515
  Description of Artificial Sequence: Synthetic polypeptide

SEQ ID NO: 4083 - protein, 107 aa, Artificial Sequence; identical to SEQ ID NO: 3516
  Description of Artificial Sequence: Synthetic polypeptide

SEQ ID NO: 4084 - protein, 107 aa, Artificial Sequence; identical to SEQ ID NO: 3517
  Description of Artificial Sequence: Synthetic polypeptide

SEQ ID NO: 4085 - protein, 107 aa, Artificial Sequence; identical to SEQ ID NO: 3518
  Description of Artificial Sequence: Synthetic polypeptide

SEQ ID NO: 4086 - protein, 106 aa, Artificial Sequence
  Description of Artificial Sequence: Synthetic polypeptide
EIVLTQSPATLSLSPGERATLSCRASQGVSNYLAWYQQKPGQAPRLLIYDASNRATGIPARFSGSGSGTDFTLTISSLEPEDFAVYYCQQRYSWVTFGGGTKVEIK

SEQ ID NO: 4087 - protein, 107 aa, Artificial Sequence
  Description of Artificial Sequence: Synthetic polypeptide
EIVLTQSPATLSLSPGERATLSCRASQSVSSSLAWYQQKPGQAPRLLIYDASNRATGIPARFSGSGSGTDFTLTISSLEPEDFAVYYCQQRINWPRSFGGGTKVEIK

SEQ ID NO: 4088 - protein, 106 aa, Artificial Sequence
  Description of Artificial Sequence: Synthetic polypeptide
EIVLTQSPATLSLSPGERATLSCRASQSVNSYLAWYQQKPGQAPRLLIYDVSNRATGIPARFSGSGSGTDFTLTISSLEPEDFAVYYCQQFSNWPTFGGGTKVEIK

SEQ ID NO: 4089 - protein, 106 aa, Artificial Sequence
  Description of Artificial Sequence: Synthetic polypeptide
EIVLTQSPATLSLSPGERATLSCRASQSVGTSLAWYQQKPGQAPRLLIYGASNRATGIPARFSGSGSGTDFTLTISSLEPEDFAVYYCQQRSNWQPFGGGTKVEIK

SEQ ID NO: 4090 - protein, 106 aa, Artificial Sequence
  Description of Artificial Sequence: Synthetic polypeptide
EIVLTQSPATLSLSPGERATLSCRATQYVNSYLAWYQQKPRQAPRLIIYDVSNRATGIPARFSGSGSGTDFTLTISSLEPEDFAVYYCQQFSNWPTFGGGTKVEIK

SEQ ID NO: 4091 - protein, 106 aa, Artificial Sequence
  Description of Artificial Sequence: Synthetic polypeptide
EIVLTQSPATLSLSPGERATLSCRASQSVGTSLAWYQQKPGQAPRLLIYGASNRATGIPARFSGSGSGTDFTLTISSLEPEDFAVYYCQLRSNWYTFGGGTKVEIK

SEQ ID NO: 4092 - protein, 106 aa, Artificial Sequence
  Description of Artificial Sequence: Synthetic polypeptide
EIVLTQSPATLSLSPGERATLSCRASQGVSNYLAWYQQKPGQAPRLLIYDASNRATGIPARFSGSGSGTDFTLSISSLEPEDFAVYYCQQRYSWVTFGGGTKVEIK

SEQ ID NO: 4093 - protein, 106 aa, Artificial Sequence; identical to SEQ ID NO: 4086
  Description of Artificial Sequence: Synthetic polypeptide

SEQ ID NO: 4094 - protein, 107 aa, Artificial Sequence
  Description of Artificial Sequence: Synthetic polypeptide
EIVLTQSPATLSLSPGERATLSCRASQSVDSRLAWYQQKPGQAPRLLIYDTSNRATGIPARFSGSGSGTDFTLTISSLEPEDFAVYYCQQRSTWPPVFGGGTKVEIK

SEQ ID NO: 4095 - protein, 107 aa, Artificial Sequence
  Description of Artificial Sequence: Synthetic polypeptide
EIVLTQSPATLSLSPGERATLSCRASQSVRHHLAWYQQKPGQAPRLLIYDASNRATGIPARFSGSGSGTDFTLTISSLEPEDFAVYYCQQRTDWPRAFGGGTKVEIK

SEQ ID NO: 4096 - protein, 107 aa, Artificial Sequence
  Description of Artificial Sequence: Synthetic polypeptide
EIVLTQSPATLSLSPGERATLSCRASQSVGNFLAWYQQKPGQAPRLLIYDASNRATGIPARFSGSGSGTDFTLTISSLEPEDFAVYYCQQSSTWPLTFGGGTKVEIK

SEQ ID NO: 4097 - protein, 106 aa, Artificial Sequence
  Description of Artificial Sequence: Synthetic polypeptide
EIVLTQSPATLSLSPGERATLSCRASESISTYLAWYQQKPGQAPRLLIYDASNRATGIPARFSGSGSGTDFTLTISSLEPEDFAVYYCQQRSGLITFGGGTKVEIK

SEQ ID NO: 4098 - protein, 105 aa, Artificial Sequence
  Description of Artificial Sequence: Synthetic polypeptide
EIVLTQSPATLSLSPGERATLSCRASQSVGDFLAWYQQKPGQAPRLLIYDTSNRATGIPARFSGSGSGTDFTLTISSLEPEDFAVYYCQQRSNLTFGGGTKVEIK

SEQ ID NO: 4099 - protein, 107 aa, Artificial Sequence
  Description of Artificial Sequence: Synthetic polypeptide
DIQMTQSPSSLSASVGDRVTITCRASQTIRNSLNWYQQKPGKAPKLLIYASSSLQSGVPSRFSGSGSGTDFTLTISSLQPEDFATYYCQQTHSIPKTFGQGTKVEIK

SEQ ID NO: 4100 - protein, 107 aa, Artificial Sequence; identical to SEQ ID NO: 4087
  Description of Artificial Sequence: Synthetic polypeptide

SEQ ID NO: 4101 - protein, 107 aa, Artificial Sequence
  Description of Artificial Sequence: Synthetic polypeptide
EIVLTQSPATLSLSPGERATLSCRASQDVSTYLAWYQQKPGQAPRLLIYDASNRATGIPARFSGSGSGTDFTLTISSLEPEDFAVYYCQQRRDWPQTFGGGTKVEIK

SEQ ID NO: 4102 - protein, 107 aa, Artificial Sequence
  Description of Artificial Sequence: Synthetic polypeptide
EIVLTQSPATLSLSPGERATLSCRASQDVSTYLAWYQQKPGQAPRLLIYDASNRATGIPARFSGSGSGTDFTPFITNFEPEDFAVYYCQQRRDWPQTFGGGTKVEIK

SEQ ID NO: 4103 - protein, 107 aa, Artificial Sequence; identical to SEQ ID NO: 4102
  Description of Artificial Sequence: Synthetic polypeptide

SEQ ID NO: 4104 - protein, 107 aa, Artificial Sequence
  Description of Artificial Sequence: Synthetic polypeptide
EIVLTQSPATLSLSPGERATLSCRASQDVSTYLAWYQQKPGQAPRLLIYDASNRATGIPARFSGSGSGTDFTLFITNFEPEDFAVYYCQQRRDWPQTFGGGTKVEIK

SEQ ID NO: 4105 - protein, 107 aa, Artificial Sequence
  Description of Artificial Sequence: Synthetic polypeptide
EIVLTQSPATLSLSPGERATLSCRASQDVSTYLAWYQQKPGQAPRLLIYDASNRATGIPARFSGSGSGTDFTLTISSFEPEDFAVYYCQQRRDWPQTFGGGTKVEIK

SEQ ID NO: 4106 - protein, 107 aa, Artificial Sequence
  Description of Artificial Sequence: Synthetic polypeptide
EIVLTQSPATLSLSPGERATLSCRASQDVSTYLAWYQQKPGQAPRLLIYDASNRATGIPARFSGSGSGTDFTPFITNFEHEDFAVYYCQQRRDWPQTFGGGTKVEIK

SEQ ID NO: 4107 - protein, 108 aa, Artificial Sequence
  Description of Artificial Sequence: Synthetic polypeptide
EIVLTQSPATLSLSPGERATLSCRASQSLGSFLAWYQQKPGQAPRLLIYDASNRATGIPARFSGSGSGTDFTLTISSLEPEDFAVYYCQQRALWPRLTFGGGTKVEIK

SEQ ID NO: 4108 - protein, 106 aa, Artificial Sequence; identical to SEQ ID NO: 4088
  Description of Artificial Sequence: Synthetic polypeptide

SEQ ID NO: 4109 - protein, 109 aa, Artificial Sequence
  Description of Artificial Sequence: Synthetic polypeptide
EIVLTQSPATLSLSPGERATLSCRASQNIGNHLAWYQQKPGQAPRLLIYDASNRATGIPARFSGSGSGTDFTLTISSLEPEDFAVYYCQQRDNGPPEGTFGGGTKVEIK

SEQ ID NO: 4110 - protein, 107 aa, Artificial Sequence
  Description of Artificial Sequence: Synthetic polypeptide
EIVLTQSPATLSLSPGERATLSCRASQSVGSYLAWYQQKPGQAPRLLIYDAVNRATGIPARFSGSGSGTDFTLTISSLEPEDFAVYYCQQRFTWPTTFGGGTKVEIK

SEQ ID NO: 4111 - protein, 107 aa, Artificial Sequence
  Description of Artificial Sequence: Synthetic polypeptide
EIVLTQSPATLSLSPGERATLSCRASQSITDYLAWYQQKPGQAPRLLIYDASNRATGIPARFSGSGSGTDFTLTISSLEPEDFAVYYCHQRNNWPPTFGGGTKVEIK

SEQ ID NO: 4112 - protein, 107 aa, Artificial Sequence
  Description of Artificial Sequence: Synthetic polypeptide
EIVLTQSPATLSLSPGERATLSCRASQSVDSSLAWYQQKPGQAPRLLIYDASNRATGIPARFSGSGSGTDFTLTISSLEPEDFAVYYCQQQSNWPGTFGGGTKVEIK

SEQ ID NO: 4113 - protein, 108 aa, Artificial Sequence
  Description of Artificial Sequence: Synthetic polypeptide
EIVLTQSPATLSLSPGERATLSCRASQSIGSYLAWYQQKPGQAPRLLIYDGSNRATGIPARFSGSGSGTDFTLTISSLEPEDFAVYYCQQRTNWPLFSFGGGTKVEIK

SEQ ID NO: 4114 - protein, 107 aa, Artificial Sequence
  Description of Artificial Sequence: Synthetic polypeptide
EIVLTQSPATLSLSPGERATLSCRASQTVTNYLAWYQQKPGQAPRLLIYDTSNRATGIPARFSGSGSGTDFTLTISSLEPEDFAVYYCQHRDDWPPTFGGGTKVEIK

SEQ ID NO: 4115 - protein, 107 aa, Artificial Sequence
  Description of Artificial Sequence: Synthetic polypeptide
EIVLTQSPATLSLSPGERATLSCRASQSVSYYLAWYQQKPGQAPRLLIYDSSNRATGIPARFSGSGSGTDFTLTISSLEPEDFAVYYCQQRSNWQGNFGGGTKVEIK

SEQ ID NO: 4116 - protein, 107 aa, Artificial Sequence
  Description of Artificial Sequence: Synthetic polypeptide
EIVLTQSPATLSLSPGERATLSCRASQSVSTSLAWYQQKPGQAPRLLIYDATNRATGIPARFSGSGSGTDFTLTISSLEPEDFAVYYCQQHYSWPLTFGGGTKVEIK

SEQ ID NO: 4117 - protein, 108 aa, Artificial Sequence
  Description of Artificial Sequence: Synthetic polypeptide
EIVLTQSPATLSLSPGERATLSCRASHNINNFLAWYQQKPGQAPRLLIYDTSNRATGIPARFSGSGSGTDFTLTISSLEPEDFAVYYCQQGRNWPPSSFGGGTKVEIK

SEQ ID NO: 4118 - protein, 107 aa, Artificial Sequence
  Description of Artificial Sequence: Synthetic polypeptide
EIVLTQSPATLSLSPGERATLSCRASQSVGTSLAWYQQKPGQAPRLLIYGASNRATGIPARFSGSGSGTDFTLTISSLEPEDFAVYYCQERSNWPDTFGGGTKVEIK

SEQ ID NO: 4119 - protein, 107 aa, Artificial Sequence
  Description of Artificial Sequence: Synthetic polypeptide
EIVLTQSPATLSLSPGERATLSCRASQSVSSQLAWYQQKPGQAPRLLMYDTSNRATGIPARFSGSGSGTDFTLTISSLEPEDFAVYYCQQRYNWPSTFGGGTKVEIK

SEQ ID NO: 4120 - protein, 109 aa, Artificial Sequence
  Description of Artificial Sequence: Synthetic polypeptide
EIVLTQSPATLSLSPGERATLSCRASQSVDSRLAWYQQKPGQAPRLLIYDASNRATGIPARFSGSGSGTDFTLTISSLEPEDFAVYYCQQRTNLPPSITFGGGTKAKLK

SEQ ID NO: 4121 - protein, 106 aa, Artificial Sequence
  Description of Artificial Sequence: Synthetic polypeptide
EMVVPQSPPTVSLSPGERATLSCRASQSVGSYLAWYQQKPGQAPRLLIYDAVNRATGIPARFSGSGSGTDFTLTISSLEPEDFAVYYCQQRSDSITFGGGTKVEIK

SEQ ID NO: 4122 - protein, 107 aa, Artificial Sequence
  Description of Artificial Sequence: Synthetic polypeptide
EIVLTQSPATLSLSPGERATLSCRASQSLGRYLAWYQQKPGQAPRLLIYDSSNRATGIPARFSGSGSGTDFTLTISSLEPEDFAVYYCQQYGDWPETFGGGTKVEIK

SEQ ID NO: 4123 - protein, 108 aa, Artificial Sequence
  Description of Artificial Sequence: Synthetic polypeptide
EIVLTQSPATLSLSPGERATLSCRASQNIGSHLAWYQQKPGQAPRLLIYDVSNRATGIPARFSGSGSGTDFTLTISSLEPEDFAVYYCQQRDYWPPYTFGGGTKVEIK

SEQ ID NO: 4124 - protein, 108 aa, Artificial Sequence
  Description of Artificial Sequence: Synthetic polypeptide
EIVLTQSPATLSLSPGERATLSCRASQSLTSYLAWYQQKPGQAPRLLIYDASNRATGIPARFSGSGSGTDFTLTISSLEPEDFAVYYCQQRHYWPPITFGGGTKVEIK

SEQ ID NO: 4125 - protein, 107 aa, Artificial Sequence
  Description of Artificial Sequence: Synthetic polypeptide
EIVLTQSPATLSLSPGERATLSCRASQSIGSYLAWYQQKPGQAPRLLIYDASNRATGIPARFSGSGSGTDFTLTISSLEPEDFAVYYCQQRDSWPHTFGGGTKVEIK

SEQ ID NO: 4126 - protein, 105 aa, Artificial Sequence
  Description of Artificial Sequence: Synthetic polypeptide
EIVLTQSPATLSLSPGERATLSCRASQSVGSYLAWYQQKPGQAPRLLIYDAVNRATGIPARFSGSGSGTDFTLTISSLEPEDFAVYYCQQRSLWPFGGGTKVEIK

SEQ ID NO: 4127 - protein, 105 aa, Artificial Sequence
  Description of Artificial Sequence: Synthetic polypeptide
EIVLTQSPATLSLSPGERATLSCRASQSVSSHLAWYQQKPGQAPRLLIYDVSNRATGIPARFSGSGSGTDFTLTISSLEPEDFAVYYCQQRDTFTFGGGTKVEIK

SEQ ID NO: 4128 - protein, 107 aa, Artificial Sequence; identical to SEQ ID NO: 4094
  Description of Artificial Sequence: Synthetic polypeptide

SEQ ID NO: 4129 - protein, 105 aa, Artificial Sequence
  Description of Artificial Sequence: Synthetic polypeptide
EIVLTQSPATLSLSPGERATLSCRASQSVGDFLAWYQQKPGQAPRLLIYDTSNRATGIPARFSGSGSGTDFTLTISSLEPEDFAVYYCQYRSNFTFGGGTKVEIK

SEQ ID NO: 4130 - protein, 107 aa, Artificial Sequence
  Description of Artificial Sequence: Synthetic polypeptide
EIVLTQSPATLSLSPGERATLSCRASQSVGSHLAWYQQKPGQAPRLLIYDASNRATGIPARFSGSGSGTDFTLTISSLEPEDFAVYYCQQISNWPLTFGGGTKVEIK

SEQ ID NO: 4131 - protein, 107 aa, Artificial Sequence
  Description of Artificial Sequence: Synthetic polypeptide
EIVLTQSPATLSLSPGERATLSCRASQNVGQSLAWYQQKPGQAPRLLIYDASNRATGIPARFSGSGSGTDFTLTISSLEPEDFAVYYCQQRENWPPTFGGGTKVEIK

SEQ ID NO: 4132 - protein, 106 aa, Artificial Sequence
  Description of Artificial Sequence: Synthetic polypeptide
EIVLTQSPATLSLSPGERATLSCRASQSLGNYLAWYQQKPGQAPRLLIYDSSNRATGIPARFSGSGSGTDFTLTISSLEPEDFAVYYCQQRNWPYTFGGGTKVEIK

SEQ ID NO: 4133 - protein, 107 aa, Artificial Sequence
  Description of Artificial Sequence: Synthetic polypeptide
EIVLTQSPATLSLSPGERATLSCRASQSLGNYLAWYQQKPGQAPRLLIYDSSNRATGIPARFSGSGSGTDFTLTISSLEPEDFAVYYCQQRTDWPPSFGGGTKVEIK

SEQ ID NO: 4134 - protein, 108 aa, Artificial Sequence
  Description of Artificial Sequence: Synthetic polypeptide
EIVLTQSPATLSLSPGERATLSCRASQNIGNHLAWYQQKPGQAPRLLIYDVSNRATGIPARFSGSGSGTDFTLTISSLEPEDFAVYYCQQRKSWPPFTFGGGTKVEIK

SEQ ID NO: 4135 - protein, 107 aa, Artificial Sequence
  Description of Artificial Sequence: Synthetic polypeptide
EIVLTQSPATLSLSPGERATLSCRASQSVSTSLAWYQQKPGQAPRLLIYDATNRATGIPARFSGSGSGTDFTLTISSLEPEDFAVYYCQRRTDWPPTFGGGTKVEIK

SEQ ID NO: 4136 - protein, 108 aa, Artificial Sequence
  Description of Artificial Sequence: Synthetic polypeptide
EIVLTQSPATLSLSPGERATLSCRASQSVNSDLAWYQQKPGQAPRLLIYDASNRATGIPARFSGSGSGTDFTLTISSLEPEDFAVYYCQQRTDWPPATFGGGTKVEIK

SEQ ID NO: 4137 - protein, 107 aa, Artificial Sequence; identical to SEQ ID NO: 4110
  Description of Artificial Sequence: Synthetic polypeptide

SEQ ID NO: 4138 - protein, 107 aa, Artificial Sequence
  Description of Artificial Sequence: Synthetic polypeptide
EIVLTQSPATLSLSPGERATLSCRASQSVSSSLAWYQQKPGQAPRLLIYDASNRATGIPARFSGSGSGTDFTLTISSLEPEDFAVYYCQHRDDWPPTFGGGTKVEIK

SEQ ID NO: 4139 - protein, 108 aa, Artificial Sequence
  Description of Artificial Sequence: Synthetic polypeptide
EIVLTQSPATLSLSPGERATLSCRASQSVGSYLAWYQQKPGQAPRLLIYDAVNRATGIPARFSGSGSGTDFTLTISSLEPEDFAVYYCQQRNSWPPATFGGGTKVEIK

SEQ ID NO: 4140 - protein, 107 aa, Artificial Sequence
  Description of Artificial Sequence: Synthetic polypeptide
EIVLTQSPATLSLSPGERATLSCRASQSVGSYLAWYQQKPGQAPRLLIYDAVNRATGIPARFSGSGSGTDFTLTISSLEPEDFAVYYCQQVSNWPLTFGGGTKVEIK

SEQ ID NO: 4141 - protein, 108 aa, Artificial Sequence
  Description of Artificial Sequence: Synthetic polypeptide
EIVLTQSPATLSLSPGERATLSCRASQSVSSHLAWYQQKPGQAPRLLIYDVSNRATGIPARFSGSGSGTDFTLTISSLEPEDFAVYYCQVRSDWPPLTFGGGTKVEIK

SEQ ID NO: 4142 - protein, 108 aa, Artificial Sequence
  Description of Artificial Sequence: Synthetic polypeptide
EIVLTQSPATLSLSPGERATLSCRASQSLDSYLAWYQQKPGQAPRLLIYDVSNRATGIPARFSGSGSGTDFTLTISSLEPEDFAVYYCQQRRGWPPVTFGGGTKVEIK

SEQ ID NO: 4143 - protein, 107 aa, Artificial Sequence
  Description of Artificial Sequence: Synthetic polypeptide
EIVLTQSPATLSLSPGERATLSCRASQSVSKFLAWYQQKPGQAPRLLIYDASNRATGIPARFSGSGSGTDFTLTISSLEPEDFAVYYCHQHSDWPLTFGGGTKVEIK

SEQ ID NO: 4144 - protein, 106 aa, Artificial Sequence
  Description of Artificial Sequence: Synthetic polypeptide
EIVLTQSPATLSLSPGERATLSCRASQSIGGSLAWYQQKPGQAPRLLIYDASNRATGIPARFSGSGSGTDFTLTISSLEPEDFAVYYCQQRYSYFTFGGGTKVEIK

SEQ ID NO: 4145 - protein, 108 aa, Artificial Sequence
  Description of Artificial Sequence: Synthetic polypeptide
EIVLTQSPATLSLSPGERATLSCRASQSISRYLAWYQQKPGQAPRLLIYDVSNRATGIPARFSGSGSGTDFTLTISSLEPEDFAVYYCQQSSNWPLFTFGGGTKVEIK

SEQ ID NO: 4146 - protein, 108 aa, Artificial Sequence
  Description of Artificial Sequence: Synthetic polypeptide
EIVLTQSPATLSLSPGERATLSCRASQSLGNYLAWYQQKPGQAPRLLIYDSSNRATGIPARFSGSGSGTDFTLTISSLEPEDFAVYYCQQRNTWPGVTFGGGTKVEIK

SEQ ID NO: 4147 - protein, 103 aa, Artificial Sequence
  Description of Artificial Sequence: Synthetic polypeptide
EIVLTQSPATLSLSPGERATLSCRASQSVNSDLAWYQQKPGQAPRLLIYDASNRATGIPARFSGSGSGTDFTLTISSLEPEDFAVYYCQERSLFGGGTKVEIK

SEQ ID NO: 4148 - protein, 107 aa, Artificial Sequence
  Description of Artificial Sequence: Synthetic polypeptide
EIVLTQSPATLSLSPGERATLSCRASQSVRHHLAWYQQKPGQAPRLLIYDASNRATGIPARFSGSGSGTDFTLTISSLEPEDFAVYYCQERSDWPITFGGGTKVEIK

SEQ ID NO: 4149 - protein, 107 aa, Artificial Sequence
  Description of Artificial Sequence: Synthetic polypeptide
EIVLTQSPATLSLSPGERATLSCRASQSVDSRLAWYQQKPGQAPRLLIYDASNRATGIPARFSGSGSGTDFTLTISSLEPEDFAVYYCQQRSTWPPVFGGGTKVEIK

SEQ ID NO: 4150 - protein, 106 aa, Artificial Sequence
  Description of Artificial Sequence: Synthetic polypeptide
EIVLTQSPATLSLSPGERATLSCRASQSFGDSLAWYQQKPGQAPRLLIYDASNRATGIPARFSGSGSGTDFTLTISSLEPEDFAVYYCQQRSIPITFGGGTKVEIK

SEQ ID NO: 4151 - protein, 108 aa, Artificial Sequence
  Description of Artificial Sequence: Synthetic polypeptide
EIVLTQSPATLSLSPGERATLSCRASQSVNSYLAWYQQKPGQAPRLLIYDVSNRATGIPARFSGSGSGTDFTLTISSLEPEDFAVYYCQERGNWPPFTFGGGTKVEIK

SEQ ID NO: 4152 - protein, 106 aa, Artificial Sequence
  Description of Artificial Sequence: Synthetic polypeptide
EIVLTQSPATLSLSPGERATLSCRASQSVSTSLAWYQQKPGQAPRLLIYDISNRATGIPARFSGSGSGTDFTLTISSLEPEDFAVYYCQQRRSGLTFGGGTKVEIK

SEQ ID NO: 4153 - protein, 107 aa, Artificial Sequence
  Description of Artificial Sequence: Synthetic polypeptide
EIVLTQSPATLSLSPGERATLSCRASDTVSSYLAWYQQKPGQAPRLLIYDTSNRATGIPARFSGSGSGTDFTLTISSLEPEDFAVYYCQQRASWPLSFGGGTKVEIK

SEQ ID NO: 4154 - protein, 107 aa, Artificial Sequence
  Description of Artificial Sequence: Synthetic polypeptide
EIVLTQSPATLSLSPGERATLSCRASQSVRHHLAWYQQKPGQAPRLLIYDASNRATGIPARFSGSGSGTDFTLTISSLEPEDFAVYYCQQSGSWPLTFGGGTKVEIK

SEQ ID NO: 4155 - protein, 108 aa, Artificial Sequence
  Description of Artificial Sequence: Synthetic polypeptide
EIVLTQSPATLSLSPGERATLSCRASQIISSYLAWYQQKPGQAPRLLIYDTSNRATGIPARFSGSGSGTDFTLTISSLEPEDFAVYYCQVRSNWPPLTFGGGTKVEIK

SEQ ID NO: 4156 - protein, 107 aa, Artificial Sequence
  Description of Artificial Sequence: Synthetic polypeptide
EIVLTQSPATLSLSPGERATLSCRASHNIGTYLAWYQQKPGQAPRLLIYDVSNRATGIPARFSGSGSGTDFTLTISSLEPEDFAVYYCQQRADWPQTFGGGTKVEIK

SEQ ID NO: 4157 - protein, 105 aa, Artificial Sequence
  Description of Artificial Sequence: Synthetic polypeptide
EIVLTQSPATLSLSPGERATLSCRASQSIGSYLAWYQQKPGQAPRLLIYDVSNRATGIPARFSGSGSGTDFTLTISSLEPEDFAVYYCQQRDSFTFGGGTKVEIK

SEQ ID NO: 4158 - protein, 105 aa, Artificial Sequence; identical to SEQ ID NO: 4157
  Description of Artificial Sequence: Synthetic polypeptide

SEQ ID NO: 4159 - protein, 107 aa, Artificial Sequence
  Description of Artificial Sequence: Synthetic polypeptide
EIVLTQSPATLSLSPGERATLSCRASQDVSTYLAWYQQKPGQAPRLLIYDASNRATGIPARFSGSGSGTDFTLTISSLEPEDFAVYYCQQRAYWPGTFGGGTKVEIK

SEQ ID NO: 4160 - protein, 105 aa, Artificial Sequence
  Description of Artificial Sequence: Synthetic polypeptide
EIVLTQSPATLSLSPGERATLSCRASQSVGNFLAWYQQKPGQAPRLLIYDASNRATGIPARFSGSGSGTDFTLTISSLEPEDFAVYYCQHRRLLTFGGGTKVEIK

SEQ ID NO: 4161 - protein, 107 aa, Artificial Sequence
  Description of Artificial Sequence: Synthetic polypeptide
EIVLTQSPATLSLSPGERATLSCRASQRVSSYLAWYQQKPGQAPRLLIYDAFNRATGIPARFSGSGSGTDFTLTISSLEPEDFAVYYCQQRQDWPLTFGGGTKVEIK

SEQ ID NO: 4162 - protein, 107 aa, Artificial Sequence
  Description of Artificial Sequence: Synthetic polypeptide
EIVLTQSPATLSLSPGERATLSCRASQGISTYLAWYQQKPGQAPRLLIYDASNRATGIPARFSGSGSGTDFTLTISSLEPEDFAVYYCQQRRRWPPTFGGGTKVEIK

SEQ ID NO: 4163 - protein, 106 aa, Artificial Sequence
  Description of Artificial Sequence: Synthetic polypeptide
EIELTQSPATLSLSPGERATLSCRASESVSESLAWYQQKPGQAPRLLIYDASNRATGIPARFSGSGSGTDFTLTISSLEPEDFAVYYCQQRTHGVTFGGGTKVEIK

SEQ ID NO: 4164 - protein, 107 aa, Artificial Sequence
  Description of Artificial Sequence: Synthetic polypeptide
EIVLTQSPATLSLSPGERATLSCRASQSVSTSLAWYQQKPGQAPRLLIYDATNRATGIPARFSGSGSGTDFTLTISSLEPEDFAVYYCQQRQKWPLTFGGGTKVEIK

SEQ ID NO: 4165 - protein, 106 aa, Artificial Sequence
  Description of Artificial Sequence: Synthetic polypeptide
EIVLTQSPATLSLSPGERATLSCRASESISTYLAWYQQKPGQAPRLLIYDASNRATGIPARFSGSGSGTDFTLTISSLEPEDLAVYYCQQRRNSLTFGGGTKVEIK

SEQ ID NO: 4166 - protein, 108 aa, Artificial Sequence
  Description of Artificial Sequence: Synthetic polypeptide
EIVLTQSPATLSLSPGERATLSCRASQSVNSDLAWYQQKPGQAPRLLIYDASNRATGIPARFSGSGSGTDFTLTISSLEPEDFAVYYCQQRSTWSPLTFGGGTKVEIK

SEQ ID NO: 4167 - protein, 108 aa, Artificial Sequence
  Description of Artificial Sequence: Synthetic polypeptide
EIVLTQSPATLSLSPGERATLSCRASQNVGQSLAWYQQKPGQAPRLLIYDASNRATGIPARFSGSGSGTDFTLTISSLEPEDFAVYYCQLRTNWPPVTFGGGTKVEIK

SEQ ID NO: 4168 - protein, 106 aa, Artificial Sequence
  Description of Artificial Sequence: Synthetic polypeptide
EIVLTQSPATLSLSPGERATLSCRASQSVDSRLAWYQQKPGQAPRLLIYDTSNRATGIPARFSGSGSGTDFTLTISSLEPEDFAVYYCQQRSSNWTFGGGTKVEIK

SEQ ID NO: 4169 - protein, 107 aa, Artificial Sequence
  Description of Artificial Sequence: Synthetic polypeptide
EIVLTQSPATLSLSPGERATLSCRASQSVGKSLAWYQQKPGQAPRLLIYDTSNRATGIPARFSGSGSGTDFTLTISSLEPEDFAVYYCQQRGSFPLTFGGGTKVEIK

SEQ ID NO: 4170 - protein, 106 aa, Artificial Sequence
  Description of Artificial Sequence: Synthetic polypeptide
EIVLTQSPATLSLSPGERATLSCRASQSVGDFLAWYQQKPGQAPRLLIYDTSNRATGIPARFSGSGSGTDFTLTISSLEPEDFAVYYCQQRSIRGTFGGGTKVEIK

SEQ ID NO: 4171 - protein, 107 aa, Artificial Sequence
  Description of Artificial Sequence: Synthetic polypeptide
EIVLTQSPATLSLSPGERATLSCRASDTVSSYLAWYQQKPGQAPRLLIYDTSNRATGIPARFSGSGSGTDFTLTISSLEPEDFAVYYCQQRGGWPPAFGGGTKVEIK

SEQ ID NO: 4172 - protein, 107 aa, Artificial Sequence
  Description of Artificial Sequence: Synthetic polypeptide
DIQMTQSPSSLSASVGDRVTITCRASQSIGDYLNWYQQKPGKAPKLLIYEASSLQSGVPSRFSGSGSGTDFTLTISSLQPEDFATYYCLHTYLPPYSFGQGTKVEIK

SEQ ID NO: 4173 - protein, 107 aa, Artificial Sequence
  Description of Artificial Sequence: Synthetic polypeptide
DIQMTQSPSSLSASVGDRVTITCRASQSITRYLNWYQQKPGKAPKLLIYAASSLQSGVPSRFSGSGSGTDFTLTISSLQPEDFATYYCQQTYNFPHTFGQGTKVEIK

SEQ ID NO: 4174 - protein, 108 aa, Artificial Sequence
  Description of Artificial Sequence: Synthetic polypeptide
EIVLTQSPATLSLSPGERATLSCRASQSIGSYLAWYQQKPGQAPRLLIYDVSNRATGIPARFSGSGSGTDFTLTISSFEPEDFAVYYCQQRHHWPPVTFGGGTKVEIK

SEQ ID NO: 4175 - protein, 486 aa, Artificial Sequence
  Description of Artificial Sequence: Synthetic polypeptide
EVQLVESGGGLVQPGGSLRLSCAASGSTFSINAMGWFRQAPGKEREFVAGITSSGGYTNYADSVKGRFTISADNSKNTAYLQMNSLKPEDTAVYYCAADGVPEYSDYASGPVWGQGTLVTVSSGGGGSGGGGSASEVQLVESGGGLVQPGGSLRLSCAASGFTFSPSWMGWFRQAPGKEREFVATINEYGGRNYADSVKGRFTISADNSKNTAYLQMNSLKPEDTAVYYCARVDRDFDYWGQGTLVTVSSGGGGSEPKSSDKTHTCPPCPAPELLGGPSVFLFPPKPKDTLMISRTPEVTCVVVDVSHEDPEVKFNWYVDGVEVHNAKTKPREEQYNSTYRVVSVLTVLHQDWLNGKEYKCKVSNKALPAPIEKTISKAKGQPREPQVYTLPPSREEMTKNQVSLTCLVKGFYPSDIAVEWESNGQPENNYKTTPPVLDSDGSFFLYSKLTVDKSRWQQGNVFSCSVMHEALHNHYTQKSLSLSPG

SEQ ID NO: 4176 - protein, 486 aa, Artificial Sequence
  Description of Artificial Sequence: Synthetic polypeptide
EVQLVESGGGLVQPGGSLRLSCAASGFTFSPSWMGWFRQAPGKEREFVATINEYGGRNYADSVKGRFTISADNSKNTAYLQMNSLKPEDTAVYYCARVDRDFDYWGQGTLVTVSSGGGGSEPKSSDKTHTCPPCPAPELLGGPSVFLFPPKPKDTLMISRTPEVTCVVVDVSHEDPEVKFNWYVDGVEVHNAKTKPREEQYNSTYRVVSVLTVLHQDWLNGKEYKCKVSNKALPAPIEKTISKAKGQPREPQVYTLPPSREEMTKNQVSLTCLVKGFYPSDIAVEWESNGQPENNYKTTPPVLDSDGSFFLYSKLTVDKSRWQQGNVFSCSVMHEALHNHYTQKSLSLSPGGGGGSGGGGSASEVQLVESGGGLVQPGGSLRLSCAASGSTFSINAMGWFRQAPGKEREFVAGITSSGGYTNYADSVKGRFTISADNSKNTAYLQMNSLKPEDTAVYYCAADGVPEYSDYASGPVWGQGTLVTVSS

SEQ ID NO: 4177 - protein, 11 aa, Artificial Sequence
  Description of Artificial Sequence: Synthetic peptide
CARVTRDFDYW

SEQ ID NO: 4178 - protein, 11 aa, Artificial Sequence
  Description of Artificial Sequence: Synthetic peptide
CARVDRDFDYW

SEQ ID NO: 4179 - protein, 11 aa, Artificial Sequence
  Description of Artificial Sequence: Synthetic peptide
CARVYRDFDYW

SEQ ID NO: 4180 - protein, 11 aa, Artificial Sequence
  Description of Artificial Sequence: Synthetic peptide
CARVTRDFDYW

SEQ ID NO: 4181 - protein, 11 aa, Artificial Sequence
  Description of Artificial Sequence: Synthetic peptide
CARVDRDFDYW

SEQ ID NO: 4182 - protein, 11 aa, Artificial Sequence
  Description of Artificial Sequence: Synthetic peptide
CARVDYDFDYW

SEQ ID NO: 4183 - protein, 11 aa, Artificial Sequence
  Description of Artificial Sequence: Synthetic peptide
CARVDRDFDYW

SEQ ID NO: 4184 - protein, 11 aa, Artificial Sequence
  Description of Artificial Sequence: Synthetic peptide
CARVDRDFDYW

SEQ ID NO: 4185 - protein, 12 aa, Artificial Sequence
  Description of Artificial Sequence: Synthetic peptide
CWRLGNDYFDYW

SEQ ID NO: 4186 - protein, 12 aa, Artificial Sequence
  Description of Artificial Sequence: Synthetic peptide
CWRLGNDYFDYW

SEQ ID NO: 4187 - protein, 12 aa, Artificial Sequence
  Description of Artificial Sequence: Synthetic peptide
CWRLGNDYFDYW

SEQ ID NO: 4188 - protein, 12 aa, Artificial Sequence
  Description of Artificial Sequence: Synthetic peptide
CWRLGNDYFDYW

SEQ ID NO: 4189 - protein, 12 aa, Artificial Sequence
  Description of Artificial Sequence: Synthetic peptide
CWRYGNDYFDYW

SEQ ID NO: 4190 - protein, 12 aa, Artificial Sequence
  Description of Artificial Sequence: Synthetic peptide
CWRFGNDYFDYW

SEQ ID NO: 4191 - protein, 12 aa, Artificial Sequence
  Description of Artificial Sequence: Synthetic peptide
CWRLGNDYFDYW

SEQ ID NO: 4192 - protein, 12 aa, Artificial Sequence
  Description of Artificial Sequence: Synthetic peptide
CWRLGNDYFDYW

SEQ ID NO: 4193 - protein, 12 aa, Artificial Sequence
  Description of Artificial Sequence: Synthetic peptide
CWRLGNDYFDYW

SEQ ID NO: 4194 - protein, 12 aa, Artificial Sequence
  Description of Artificial Sequence: Synthetic peptide
CWRLGNDYFDYW

SEQ ID NO: 4195 - protein, 12 aa, Artificial Sequence
  Description of Artificial Sequence: Synthetic peptide
CWRLGNDYFDYW

SEQ ID NO: 4196 - protein, 12 aa, Artificial Sequence
  Description of Artificial Sequence: Synthetic peptide
CWRLGNDYFDYW

SEQ ID NO: 4197 - protein, 12 aa, Artificial Sequence
  Description of Artificial Sequence: Synthetic peptide
CWREGNDYFDYW

SEQ ID NO: 4198 - protein, 12 aa, Artificial Sequence
  Description of Artificial Sequence: Synthetic peptide
CWREGNDYFDYW

SEQ ID NO: 4199 - protein, 12 aa, Artificial Sequence
  Description of Artificial Sequence: Synthetic peptide
CWRLGNDYFDYW

SEQ ID NO: 4200 - protein, 12 aa, Artificial Sequence
  Description of Artificial Sequence: Synthetic peptide
CWRGGNDYFDYW

SEQ ID NO: 4201 - protein, 12 aa, Artificial Sequence
  Description of Artificial Sequence: Synthetic peptide
CWRLGNDYFDYW

SEQ ID NO: 4202 - protein, 12 aa, Artificial Sequence
  Description of Artificial Sequence: Synthetic peptide
CWRLGNDYFDYW

SEQ ID NO: 4203 - protein, 12 aa, Artificial Sequence
  Description of Artificial Sequence: Synthetic peptide
CWRLGNDYFDYW

SEQ ID NO: 4204 - protein, 12 aa, Artificial Sequence
  Description of Artificial Sequence: Synthetic peptide
CWRYGNDYFDYW

SEQ ID NO: 4205 - protein, 12 aa, Artificial Sequence
  Description of Artificial Sequence: Synthetic peptide
CWRYGNDYFDYW

SEQ ID NO: 4206 - protein, 12 aa, Artificial Sequence
  Description of Artificial Sequence: Synthetic peptide
CWRLGNDYFDYW

SEQ ID NO: 4207 - protein, 12 aa, Artificial Sequence
  Description of Artificial Sequence: Synthetic peptide
CWRLTNDYFDYW

SEQ ID NO: 4208 - protein, 12 aa, Artificial Sequence
  Description of Artificial Sequence: Synthetic peptide
CWRLGNDYFDYW

SEQ ID NO: 4209 - protein, 12 aa, Artificial Sequence
  Description of Artificial Sequence: Synthetic peptide
CWRLGNDYFDYW

SEQ ID NO: 4210 - protein, 12 aa, Artificial Sequence
  Description of Artificial Sequence: Synthetic peptide
CWRYGNDYFDYW

SEQ ID NO: 4211 - protein, 12 aa, Artificial Sequence
  Description of Artificial Sequence: Synthetic peptide
CWRYGNDYFDYW

SEQ ID NO: 4212 - protein, 12 aa, Artificial Sequence
  Description of Artificial Sequence: Synthetic peptide
CWRLGNDYFDYW

SEQ ID NO: 4213 - DNA, 62 bp, Artificial Sequence
  Description of Artificial Sequence: Synthetic oligonucleotide
  modified_base (51)..(52): Thymidine-succinyl hexamide CED phosphoramidite
agacaatcaaccatttggggtggacagccttgacctctagacttcggcattttttttttttt

SEQ ID NO: 4214 - DNA, 112 bp, Artificial Sequence
  Description of Artificial Sequence: Synthetic polynucleotide
  modified_base (101)..(102): Thymidine-succinyl hexamide CED phosphoramidite
cgggatccttatcgtcatcgtcgtacagatcccgacccatttgctgtccaccagtcatgctagccataccatgatgatgatgatgatgagaaccccgcattttttttttttt

SEQ ID NO: 4215 - DNA, 19 bp, Artificial Sequence
  Description of Artificial Sequence: Synthetic primer
atgcggggttctcatcatc

SEQ ID NO: 4216 - DNA, 20 bp, Artificial Sequence
  Description of Artificial Sequence: Synthetic primer
cgggatccttatcgtcatcg
